United States Patent Application Publication US 2021/0368750 A1 - sequence listing, part 4

SEQ ID NO: 36521 - DNA, 201 bp, Bos taurus
gggggagcctggtgggctgccgtctatggggtcgcacagagtcggacacgactgaagcaacttagcagcagcagcagcagcagaatgcacatggatatatrcatgtcagtgttggaaggtacacgtgttctgacttttacaccttccctcctcaccagtgtttgtgagaggtgtccctatgggccgtcctgaatgcctccc

SEQ ID NO: 36522 - DNA, 201 bp, Bos taurus
agaggagtatcattcagcttgtttgttcacacagcttagcctgccctccttcctaatttcaccgtgatttccatctgtctgtctccacgtgaccatatgtmagatggcttgaacttgaggggtattattttttgacaccatcaaacaactacagattaggttggaatcctggttctcctgttcatgatctgggaagtgctg

SEQ ID NO: 36523 - DNA, 201 bp, Bos taurus
aaggccaataagaagcaaactcttccttagtttgggtaacacaagggcaaaagatgtcccaagatccagcaaaacacccttctaacattgcctttaatgartgtttatagggcttccctggcggccctagatggtaaaggatctgcctgcaatgtaggggacccatgtttgatccctgggtggggaagatcctctgcagaa

SEQ ID NO: 36524 - DNA, 201 bp, Bos taurus
ggctggcttagtttcttattttaaaactttaccctctctggaagccttctgtgaaataactttgaaacaggcagccaatgaaatcgcctgttggactttgmggtcactttcatcaggctcatgaaagaacaaaattgctgaaacaagggcaggaaccaaactgagccctgggcttggggactggtgtctgcagccctcacc

SEQ ID NO: 36525 - DNA, 201 bp, Bos taurus
cttactaatctccatgtctggctgaaaggaaagcagctgagttctcagtctgctgtcgcctcggtctgtgctggaatcccacactgcctgtctctgggaarcagaggcaacagtcagttcctgagacagtgagaatgaaaaagcgagtggtgtcttgccatgaaaatggttttgccctcatggacaccctggaaggggctc

SEQ ID NO: 36526 - DNA, 201 bp, Bos taurus
ggccattagcgggctgtgatcttgaacagaccctgtcccctcggggctccgtttatttcctgtgcatccttattggtactgatgcttgtctagctccttcyggagcagctcacagcccgggtgggccagaagggacatgctttgggagtgagggatgccagcttctaatcttcctgctgctaccacatttaccaccttgga

SEQ ID NO: 36527 - DNA, 201 bp, Bos taurus
ttggtggatcacaccgccctctccatgggcatcactcttggccccacttcccagatgaggaaagtgaggctccaagaagtggtttggcattcacggattayaccagcaggaggcagaactggggcctggggcgcactgctggactttgaagttctgctcttcagtccttggagaagaggttgtacctccgcggaggtggac

SEQ ID NO: 36528 - DNA, 201 bp, Bos taurus
tcctagtccccactggatgctctgtatttggccttacagccagggacagggagagcagcgaggaccatgcaggaggtttgtacaactgagtgatgtaaccragggcctcactcccatacacgtgccaccggcggcaaggacagtcacccgaccatggctcactgcaaggaaggcgggaggtgtggtccagctcggtgccca

SEQ ID NO: 36529 - DNA, 201 bp, Bos taurus
atgaaactgaccatctctcttgtctctccatagaccatcaccggcctcctgcaggagtttgatgttcaggcaagtagaagatgtggcttcccttctccctygccttttctgtcttctcctttcccctttcttccatgggttagatccgtgttcagacgttagggctaaggggagagatggaagccgattccctgcactcag

SEQ ID NO: 36530 - DNA, 201 bp, Bos taurus
ttctatgcctgtgggtctatttgttttgttaataagttcatttgtatcttatttacagcttccacatacagacgacatgcatatgtacagccaggattcgrccagccgacctgtcatcctattattatcattattaattcctttcccctctgagcaccgggaaggggctgcagggggcggcggtggcagcgggtgtccagc

SEQ ID NO: 36531 - DNA, 201 bp, Bos taurus
aagtggtgcacacccccgtcagtctctgaaaggccttgctctgggagcattgatctgcccagtatctgaacctgaaatgcacagaggaaggatgcaagggytggattggccgactctggggccccttcaaactcctaacgccttgatcttaaactggagacgaagaatggagtagaatgcaagtttccaggtgggctggac

SEQ ID NO: 36532 - DNA, 201 bp, Bos taurus
ctgttcacggacggtggatgagcgccccacctacaggtggttgccatgattcttgaatgtgacagctcatgcaacgtgtctatctgagcttggcacatggygggtgcaaaataaacgataaagcaaatactactcccacgacacctgaacacctagcagctcagctaaaaatgaaagaggaagggagtcctggaagcagtc

SEQ ID NO: 36533 - DNA, 201 bp, Bos taurus
tgcttggtccagcatttcagcttcccttctaccagtgctctccaccctcttcccttccattggattaatcccatgggcctgcttcctctgcaccttgtctygacctgagcacagctacagaaatacccacagacagactggcgcctttacaggtgttgagtcttcagcctccactgcactctccatgcggcctcatgctgc

SEQ ID NO: 36534 - DNA, 201 bp, Bos taurus
tccttcagcagacatgtggggtgaagcaccctattccagggatgatcttagccactgatgaaaaccctgctaccttagtgagttcctggtctaagaacacrgtggtgggggcaacacatgcttgtcaagcgtccttcatgcgcccggagctgtgctaaggctctgtaggcatcataccgctcatccccacagaagcctatg

SEQ ID NO: 36535 - DNA, 201 bp, Bos taurus
gctttgaccaatttatgcccaagtgtgtgtctcataggatcaggcagaaaacagtcaatcagcattgcattaacgagttcctttactagaatagaactctygagaccaagggccaagtgtgctttacaaacatatggtacacattgcagatgatctcattcggggagatcacatgacttcagagccctttacgacttctca

SEQ ID NO: 36536 - DNA, 201 bp, Bos taurus
taagtctccagcaggtgggttctttaccactaggtgccacttgggaagccctagccttctacaccgaacctgtattccccaaactcatgccctatggctaytacgaatagaagtctactgctgtgtttcagggttagagcaaatgtcatcttcttcataaagcttcaccaagtagaatttattttgtatcagttttaccac

SEQ ID NO: 36537 - DNA, 201 bp, Bos taurus
cccttacactaccaccgtttgtgcccctcccttctccttcctcacgtggcactgcagatgagggcaaactctgcgccacactgaccatgcactcacccacygcctctgaggacagtctccccgctgtgacgccttttcctttctcaactccaacccactcttcaaggatcagctcttcaaatcccacccatcatatgaaaa

SEQ ID NO: 36538 - DNA, 201 bp, Bos taurus
cattttctgaagactcactttgcttcaagtcctctatttgctgctggagatcatggagatgagtaaggcactgttctcgctgccaagaatgcaagcttttrttaagactttattacaggcctttcactaacgaatcagtctctctctatcttcctcctctacaaactccccaccccccagtttctcagtctgcttcttgtc

SEQ ID NO: 36539 - DNA, 201 bp, Bos taurus
gctccgcctcttaggccaaggcagggggtggtcttccacttccactcttccactcagacatgcaaaatgaaatccaccatgagaagtcttcccccaaaccytcatttggactccttgcgatgatcatactctttctggtaacataactctggcctcatttcttgtaaacagccctggtcttcttttgtttaaagattgttg

SEQ ID NO: 36540 - DNA, 201 bp, Bos taurus
cccagggaaggggtggccagggcctcaaggggaggagggggtagcagagggagaagacagtatccatggcaaacctgaggctcctacaagacagctgtacyggcccagatcttagcggagtgagatggtggtgccaggggccaagttttaactgggcaagatggtggtgccaaggccaggtttttgcaggacaaggtggca

SEQ ID NO: 36541 - DNA, 201 bp, Bos taurus
tttggttttacactcaacccctttaatgcccacattaagctcttcctgtccctcaaaggcattccttatgggtgtgtgatcactcttgcccagtctatggrctgtttcagtggccatgggagaggactctacagaaattttaataccatggggaaatatttctgtcatagagttagaaagggaaagatcaggttatcatat

SEQ ID NO: 36542 - DNA, 201 bp, Bos taurus
acatagttaacttaagcctaaacacatcacattcataggagatactccatggggtcatcctttctgtttctctttattaaagaattgctgaagatccagcmagactgggtctacaggctcagattgtgctgccaggaatccctttgtttccctatgtctcagctctgcttttctcccttggagattccattctctgctgga

SEQ ID NO: 36543 - DNA, 201 bp, Bos taurus
ttaatcctgtttatatttgtgtgtctgaattttaattataggccatctccatgactttctggaagggtacaagtgtaaattttgagtctataagttaaatmttttagaaaatgaaatattattctggagctcagaattgttattagattttaataatttattttgtatgtgcgtttaccaaacatgtattcaaggcttgct

SEQ ID NO: 36544 - DNA, 201 bp, Bos taurus
ctcgggttgggcccccggggaggggcccggaggacagaggaccagtgtgagcaaaggctcagagagatacgatggacccaggaggcccgctgattggccayggacggtcggatagatgaactctgtccatgtgaacggcttcattctccgtgatgacttagcaggaacgtcaggcctcatctccagactgtgtttgcccat

SEQ ID NO: 36545 - DNA, 201 bp, Bos taurus
tggtttgattggcaggtactcatccccatgtccattcatctgggagcaagggccaggcttctggtgcatgtggagtgatgctgagcccagaagtaaggcargagagaggaaataaggttgcagggccaccttctgcaattgcagtggttgtgcccaacacatagctgcctgccagacaggcaactaggggctgaaacccca

SEQ ID NO: 36546 - DNA, 201 bp, Bos taurus
tttctgtctggttcagcctccaggtaggaagacccaggcctggcgtcattgctggggctggtgatctggggtgggagctggtcagagaccatcatcgctgygtttcttcagatgcccaagtccagcgccttctaacatccccaaacccacttctccaatgtgctttcttttcagagacagccagcaaggaagagctgctga

SEQ ID NO: 36547 - DNA, 201 bp, Bos taurus
tcacacagcatccccatcactacctgccaacagcagggtaaggctctgccgtcacaggggtcagtgtgacggagctgcaggccagctgcaaggtggcatgrggtatagatcacagtggaactaagctgtttttaagttctaaactagacattctcctctgaatacggtatatataattttaacaatgggattacatcatat

SEQ ID NO: 36548 - DNA, 201 bp, Bos taurus
taggtatttattattagaactgacaggcaacaaagattctgtacacagggaatgttgcctgccattcgcatcctacaaggtcaagccatcagccactgccrtttcccacaatggtacgccctaagggggattcaggatggggagaaatgggaagcattctattaattagacactggccccacagccaaggtgcatattcca

SEQ ID NO: 36549 - DNA, 201 bp, Bos taurus
ccgtccgagccaccaggaagtccaaaataaagatctccccaatttacttatacttcactgacaggctggtcttggaggtgaacctggatataatctctacmttttcagccttgtttcccaaataaaaactgtgactattcacagttcttaaaatcaatccccaaacttcttcatttccacgcatttgctcataccattcta

SEQ ID NO: 36550 - DNA, 201 bp, Bos taurus
taaatgttaattagttttccttcctccccagggtgtgatggctccttcaggttctagggagggggcatatgtatagtctttagttgaaactattggtcctytctctgtccattcaaccacctgtaatatggatgtgagagttgggctgtgaagaaggctgagcgccgaagaattgatgcttttgaactgtggtgttggaga

SEQ ID NO: 36551 - DNA, 201 bp, Bos taurus
catgcagaagacgttaagagcctgagagcagaagttgcctttgggtgcattttctacctttggcaggagcatcttgaatcctttcctgggaaactgaatgraagagaaagggcatgtgactaaaaggaatgcagtggatactatcgcgaggactggtttaatactttgcacttgtcctgccctgtgcccagcacatcttgc

SEQ ID NO: 36552 - DNA, 201 bp, Bos taurus
gaaagatctggtaggtggtacctctatatcagaaacagtatgtgattgctttttatttttccatttttttttttttgctacaacccagaaaaaagtttcaytgttagccccaatgttgagtgttgcctatgaattaatgatttaccgaaattggaaatggccaaaaaataacagcctttcttagtgggaagtcccaagtct

SEQ ID NO: 36553 - DNA, 201 bp, Bos taurus
gactctaaattttggagacagacacagctcatttggcttagagaagacaaagtaggaatcaacagttgaagatatgaaaggaaaggaaaatggaggaaaarcaatatgtgttaagtatcgcatataaacatatacaggatgtgatgtaggatatgtatatgatattatcatcagaaagataaatatagtaaattaaagagc

SEQ ID NO: 36554 - DNA, 201 bp, Bos taurus
ggcctgtgacctgaattaaggacctgcagttccctctgcctcatggtgcatcctatagtgtatacattggttcgagctacttctgaagagtcacactgatratgaattggaatttggccagaaccagagcaacatgtgggatctttgtttcctgaccaggaatccatgccccctgcaatgggatggtaaagaatctgcctg

SEQ ID NO: 36555 - DNA, 201 bp, Bos taurus
gagttgagaagataatgatgtgccagcctctatttccgatggattttctgaggtttaacaagccctgcttttgtctttctgtgtctaacaaagtcatagcytactaaatgaggggctcttgtgttcaaattatgttgattttatagataaaatcatattgctctggtaccataacatgttatctagaattcctctccttat

SEQ ID NO: 36556 - DNA, 201 bp, Bos taurus
tccccgtgggaaaaattttttcctcttgtcttaaataatttaatttcacataagtatttattatacaactcagtgatctcacaaccaccttttttaaaaarggtgacttggggttgctgaacaaaaccccaaatctgcaaatagcagcccttctgttcccatcagaggttgactgtcttaagatgctgacaacgtttctgt

SEQ ID NO: 36557 - DNA, 201 bp, Bos taurus
gtaatagacatttctgctccctctcctcaaatttctcatagaagagaggaagctgatgaaggtgaccatttcttttgtttgtggatccctaacctgagaaktttctggcatataattgaaaacaatataatgataggtttcatagattgtatttcaaatgagagaatagcaaaccattagcaaaattaaatattcaaaaga

SEQ ID NO: 36558 - DNA, 201 bp, Bos taurus
ttaagagcccagatgctggttttcagcattatcttaactctaccctcagtagctcacagaccaccctaagcatacttccagtcctcaccctggtttcccaygacccagagcaagatactatgaccagggttgcagttattctaaaaacacaagttcacaaagtagccaagttagggcatcctggcaacaaatttaaagatg

SEQ ID NO: 36559 - DNA, 201 bp, Bos taurus
agcataggtgcaagcaagcttggaagtactgcctgcctagaggactgccctgctttctttctctcctccaggacaagcatttgcataaaatgagggtgctractccctcattgttttcaccttgacttccccctccgggtgtgctgtagcaatagatgcccctgaagccattttgctgactggaatagagccagttagatg

SEQ ID NO: 36560 - DNA, 201 bp, Bos taurus
atggcccaggtgagtatggaaactgtgaaccctgtagggggtcaaggacagaaccgtaacaacaatcaccaacattgaagatagtagataagctccccccmaaaaaaaaatccttgaaggggccagacacaaggaaaatagatgtgatataactagcacagagaagtcgagagacctatgaacttgggtgtgatcatcaca

SEQ ID NO: 36561 - DNA, 201 bp, Bos taurus
catcaaatgcctgacacactgaactacagagcaggaccccacccagggtgcccctttaagtgcctgactcactgaacaaagagaaggctcccaggcaatcragccctctaagtgcctgaatgggcagaactattgaaaaactggccaaagaggccttctgattgccagctacaagaggctggaaaaaagaccctgataggg

SEQ ID NO: 36562 - DNA, 201 bp, Bos taurus
tatttagaaattcagaagttacagtaaaaacatgtgtggaaattccaacatgtcatcatttacttctgaggctaatgagtactttggggataatcatttcrtataaagaaaatcaccatcttaccttcagcaataaatcatggactgcgtacacaggggtaacccttagtttgcctggtctgccgaggactgagagctcct

SEQ ID NO: 36563 - DNA, 201 bp, Bos taurus
ggtcttggattgctggcaaaagcggagtcgatctcctgtctcgccctgggttgtagcctggtcctgtctgttgactgatgtaaaagagctgggaactcacytccaccagattctaagcttcttcagagaagatgcctttctaaatggttccagtctggattccaagcagccaaaaaaggctagtattttctcctctgaatt

SEQ ID NO: 36564 - DNA, 201 bp, Bos taurus
gtgagcaaacaatcttctttttttgccagattaatataataggtgtatagggtctctcataggagttttagtttacatttttttccgcaatgagagtaagyccctttcttgtgattaaaggccaccgttacccatttctccgtgaacttagcacttcctgcacatgcttttcctttcggattgttagtcctttcctttttc

SEQ ID NO: 36565 - DNA, 201 bp, Bos taurus
aggcaaagagagcagcagatgcctgttttctgaccagggaaatgaagacagaacctgtctgctgagtggcatcaccttgtcctcccagtacatggtgagcyatgtcttaaattgccttgacaaggttcttcctaagtaaaagtttgttgtaaaacatgtcccgtaatgtgtgataaagatgttcaaggaaggcaaggaaaa

SEQ ID NO: 36566 - DNA, 201 bp, Bos taurus
atttttccctgtgcatggttgttatcgtgaccttctatggccagatgctgagaaatggttttgtcttccgccttccgtgttttctgtaaatcagtcactcraattaagggcaattgttcggcctctctaaatgccatcttacagattctggcattggccttgacagcccgtggagctgtcgtgacaaatgcacggtggctg

SEQ ID NO: 36567 - DNA, 201 bp, Bos taurus
gggaaatcccatggacagaggagcctggtgggctacagtcatggggccgcaaagccagacatgactcaacaactaaaccatcaccacctttgccaggcacmgccctaactgctttacttgcgataacatcattttgacagtggatagatacccttactttcctagtttttacagatgagagaatggagggaggaattcaga

SEQ ID NO: 36568 - DNA, 201 bp, Bos taurus
ggtactcgttttcaccttaaatattttaattgctatgctaggactagacatttttagagtgcacagtctttttcatcatagtatctcctagggtatctctyttagtggtatatacataaacagactttgtgataaatgtttggtgttgggttttatcttttttcaacctgtgtatacagttggacctactctaatttctgg

SEQ ID NO: 36569 - DNA, 201 bp, Bos taurus
ggggcaagctgggcacaggtggggtgttgaggcctccctgagatctggcctggaagcccgctacgaaaggcacctgagtgctcaggcccatgaggaaacarcctccctctccctcttcctgccccttactcagcagctgcccctcctccaccagttcctccggcctccacatgccccagcgatcctcctccatcatcagct

SEQ ID NO: 36570 - DNA, 201 bp, Bos taurus
tgcctggactacctccccctgcaatgtctgtacggtccacttcccatcttataaccctttaagtctttgttcaaaagtcccttctcagtgaggccttcccmgtcaaattgccaagaccaccgtcacccctcccgctgctcatggatgtctaccgttcctagccctctatctggccctgcagtggatgataattctgagcct

SEQ ID NO: 36571 - DNA, 201 bp, Bos taurus
tgtaatactttacgtgcctcagatccccaaagcctatgaggtgggtggtattattattattacaattattattgttattttagtcctgtgtgcacagtacmggcactagagccagagtacctgattgaaatgcctactctgctgtagtctaattccctggaggctcagatggtaaagagcctgtcttcaatgcaggagacc

SEQ ID NO: 36572 - DNA, 201 bp, Bos taurus
accatactggatgacacagtggtatatttttgaagtcctttcttacctgctgacgtcctacatcctctcaataccttgtgtgcgtgcgtgtctcagtatcycacacgtgaggaaacgaacatcacagatgtgagatgaaggctagcccaggtccctcggctagcagttacagaggtcccttgatgacatcatgcatatcgc

SEQ ID NO: 36573 - DNA, 201 bp, Bos taurus
gcagcagcagcacactgtatttgtacgttatctcttttcaccctggtggtgaccagataagctaggtaccatcatcatcccattttacagatgagaagatkgagactctgataggttaaatgaccccataaataaaatcggaaatcttgatgaaagaagactggggatttgagctttggcttcagtacttactagctattg

SEQ ID NO: 36574 - DNA, 201 bp, Bos taurus
acacttttacaactattggggtgagtcaaatgaaggaggctgcttgatgtagtagaagaagcaccagccaatgagcctagagccatcagactgaatttcartcctaaaacttgtgtgatcatgagcaagtcactgctcatctctggtctttctccattacataaagggattgtgttatctagctcaccctctgctcctgtc

SEQ ID NO: 36575 - DNA, 201 bp, Bos taurus
gttcagatattcatggagttgtgcaactggcaacacaatcagcttcagaacatttttgtcctcaccgagaattccctatgctcattagcagtggctccccrtcttatgcaacatttctgtaacaaacctctcttatccttctctaaaggggtccaggaatgtacacccttgtaagtcatctaatagttattgaaactgctg

SEQ ID NO: 36576 - DNA, 201 bp, Bos taurus
accttttgatttcagagggcctcaggtcaagctaagctccttggtttattaaaggctctccccatacctttgactgccttgctgcatttttccttatcccrtaaatgccacaagcaccttgccttctgggaagtggatctggagtccttctgtctccttgattggctgcctttgtcataaaccctcccttaactgcaagcc

SEQ ID NO: 36577 - DNA, 201 bp, Bos taurus
gagtgtcaggatcccactgggccaacaaagaggctgcgtctctggctggttcagacaccgaggttaatgaggtgctgtgttggctttgtagctgaagcagycccagacctctggccttctgctgtgctacgctgccttttttcactgcatttaccgtgtgggttttcagaagcccaggcaaagccaagaatttcctgaaaa

SEQ ID NO: 36578 - DNA, 201 bp, Bos taurus
cttgaacgtggagtagctcctttcagccaagatacttcaaataccatttcttagaaatgaccacgattttattcttgaagcttttagtgtgaacaacattyccaagttttccagtgtttccattcactttaaccttttcctgcagaaactgttgaaaatttccagaatcaaaaattctatcttctactggatgagtaagat

SEQ ID NO: 36579 - DNA, 201 bp, Bos taurus
acactactgtcctaagtatattgcaaacattttctcattttctatgctgttaatatttcctctacatacatttttaaagaagcactgaaattttaagaatmtaatgtcacacagctaataaaccgcagaacaatgtttgaaacaggcggtctaactgcagaattagattgatactttacatacaggacattcatgagattc

SEQ ID NO: 36580 - DNA, 201 bp, Bos taurus
atatagggcagagagttaaaagcttaggccagtgatgtcagcagagctatttcatggaagatttaaataataggttttggatctcaggctggaccttgagrgcagtgtgtggccgtaggagagttttatgggtaggaggacaatggacaagttacttttccaaagggaccactctgattgcaataataagattgcattaga

SEQ ID NO: 36581 - DNA, 201 bp, Bos taurus
ctgaaaacaacttgcaagtgtatccataggaaaatgaattcctctggccctttatccttcaacctttgcataggacttaataggtcatggagcactttaaygtttataggctcatttttcattctcgtaataatcatgttaacagggcaaagagaattatccttcccgttttacaaacaagaacattcctcagcaagcatc

SEQ ID NO: 36582 - DNA, 201 bp, Bos taurus
ttggaagctctgtactctcacacactgacagaaattcaggaagcactccattctttccagctcctgggaaaccctccatcccgcctcagactggaagcctyctgatgcaaagaaacttggctgtccctgtctgtccattctcccagccctccttccccacgacccaggctcttgttatcacgttgtgttagttcatctatt

SEQ ID NO: 36583 - DNA, 201 bp, Bos taurus
gtgtggcatttgtctccatcacctgcaagttggccttgagagcaggcttgtgactggctgactcattctgcctggccccaaaacagctaggtgaagatggmttagagagcgagggaggggttcatataaatgcaaaaacatcttccaagcacctccaatggaagctctagggcccagtgggaatggcacaggccaggaacc

SEQ ID NO: 36584 - DNA, 201 bp, Bos taurus
tacatgtgtgtgtgtatatatatatatatatatatatgcaattcatcttaatgtagaggctcagatgggtgatgggaagtcaaaaacatcaagaagagccrgaagactgaagaaaaagaaaaaggcatatttatgagctccagttaaatataaacaatcttcagtcaatagtatttatgaaaggcatgaatgttttcagag

SEQ ID NO: 36585 - DNA, 201 bp, Bos taurus
ggagagccatagtgaaatctgaaactgaagatcacactgaaaatcaagatcaagtactccttaagcaggggggcaatgaagttgaggattgaaggatcagraggaagccttgtgagaccaccttgagtgtgcagtgaagtttgtttaagtcacagcatgtgcaaaggacctgaggcagcagaaacaacggtatgtttgaga

SEQ ID NO: 36586 - DNA, 201 bp, Bos taurus
atttcattggttggagatgtgtgctgcagaaaccacgggctggagggaggaagagcatggcgcaatccactgggagggagggcctctgagaaaggggcacrtgggctgagccaggtgactggtgctgtgccaagtgccgagagaagaaggtcctgctgtggacggctcaggacacggtggtctcacacatggtggccgaag

SEQ ID NO: 36587 - DNA, 201 bp, Bos taurus
accattagggcattatcttgaggaccatactgggaggctgcccggggagccgaaggatattaactaaaatagaggagggtgcaagctggggtgtgcatctytgaaaggcctcctaaggcagctggcgtggattattctgaatcatgttgtaaaagaagaattaggtggcaaccaggtaagaggtgggggtggtggtgccag

SEQ ID NO: 36588 - DNA, 201 bp, Bos taurus
gaaatgaaatcacttgtgcacagcaaaaagcatccagcacagagctagacagacgctgggaacaaagcagactatggccttcacacctcatcacaacaacktgcatgcacagatctgcccacaaataccaatttgctgattctcaaccatctgaagagatttttttacaaaccctgaggcccagattcctccataggccaa

SEQ ID NO: 36589 - DNA, 201 bp, Bos taurus
gtgtgacgctgaggtttacctgtgcagaatcctgagctatcacagtgggactgtgtgatcccatggcctcaacaggtgaaatatagttccaggacctggasagagagcatcacttgacaggagctgtcaccttggtgtgagggatgtggccagcacttaacccaataccctgacttcactgtctcctccttctgatctctt

SEQ ID NO: 36590 - DNA, 201 bp, Bos taurus
tttttcatctttttcacaattcaggtttccaaaagtgggaggccacctccccaaagtcactactcctgttgcaaaggacacaagcaaataaccctctggtrtaacacagaagactagactttggcctgtataatcatgaggatgatatcagctaaaagggaattatgttaacttgatcatttctcatctttgaaattcaaa

SEQ ID NO: 36591 - DNA, 201 bp, Bos taurus
atggcgacagggatgagaagagaggctcctctgcattgtgactaggctaggatatgcctgatattttacagttctagcagctctcttactggggcggccckgacggttctccatgctccagccatggttccaccaaggatgtgtatctggacctctgtgacatcctccatggccactgacagcaaatcagctctgaatata

SEQ ID NO: 36592 - DNA, 201 bp, Bos taurus
attctatataactaagagaagtacaacttcctccccaagatttctgaaaattcttaccattctccaaagtactccattaaaaggctgttcttgcctttaayggccttgtttttaaaaataatggcaagtggttactgcaaagaacaaaagacatccattaaagtaactatctgatgtcactttctaatttccttagctatt

SEQ ID NO: 36593 - DNA, 201 bp, Bos taurus
gtgtcttctttatttgatcagtctgattagaggtttatccattttatagataaaacctgcattgagcacataagataacacaagggcaagcagatgagatrgttttaagagtttgccttgtaatcccaagaggctcttcaaacaagcaattgctgaagtatgaaggaacactagtaaaacaattggtttcaaagatgaacc

SEQ ID NO: 36594 - DNA, 201 bp, Bos taurus
gtccacatttacatattttgagaccatgttgtttgatggctacaaatttaggattgttgtgtactctttttgggttgccctactgactactgtgaaatatytttttgatagtgatctttcttacctcagggtcttctttgtcacattataatatggctacattagtggttagttttacttagtatttcacaatgtatattt

SEQ ID NO: 36595 - DNA, 201 bp, Bos taurus
actggggcaactctaccagagtctccacatcttagtccttactggtagactaccttgggttcacgtattcattaaccagtgactcattgagtttcctctayacctggaagtgtgggtaatggcttacctgtccagttcacatgcatgactaatttttgatatcagtgatctccctctcctgagagagcaaagttcaatgat

SEQ ID NO: 36596 - DNA, 201 bp, Bos taurus
aacagcattgaaaggcccagataattaatgtaaaagtgtgtggagctttccagaaactgcaggtggtacagtgtagctggatcacagcatcctggaagacrgatggagataaggccaccaaaggaagcaagaaccaactcaagaaggaccaacatgtcatcagctgtgaatgccatatagagggttctggaaagttctgaa

SEQ ID NO: 36597 - DNA, 201 bp, Bos taurus
gctggtccattcttctctcaatcttggctggctatactcagtgttcacagtcagttgggcagctctgattccggggtttggctggccatggccagggtgayagagaaacaaagtctgtgtcccttgtcacccaccaggcaagcccaagattattcacacagtgggcctgagactccaaaagctacagaatacaagctgcag

SEQ ID NO: 36598 - DNA, 201 bp, Bos taurus
cagctttccctccagcatgaacacactgcttgggactgaccacccctgggaagggccacttcccttcctgcagcaactcaccaggcctttttcttccgctygtgcttggactcaatcatgcgaacaatggcttcctcttcataggtgtggccacacactttatttttcactggtttcttcatttccaactgtaatcaagaa

SEQ ID NO: 36599 - DNA, 201 bp, Bos taurus
gtccacaaggtgataaatgcctggccccacgtccccagctcaggacagctctgaagggtcctccatcttcagagctccctgcagcttctgctgaggccatrtcctcccagcctgactttttcctctgcccagtcctccttccctcctctcccttccaggggtgccggaccccagagcactccctgacaggcttcttcatcc

SEQ ID NO: 36600 - DNA, 201 bp, Bos taurus
atattagcattccatattgtttcccagaggaaatggctctgaaaggttttttgtcctttttagcaaatattttgtagtggctgtgaaaataacttatttakaaaaatcttttaaacgctagtcattatgacagcaaagtcaatctagtcctgtaactattgttaagtagttatgaatgtggaaataaattcgagctgtttt

SEQ ID NO: 36601 - DNA, 201 bp, Bos taurus
ccagatgtagttcagcactgcctaaattcttgatggcttgacttccttcatcttataaaactgataattctctatgctgtttacatgtccttctttcccaytaatccataaacttcaacagctgagaaaaaaatccttgttaatatttatttattcatcagccagcatagaacctgaacggcaaattctgacatgaataaa

SEQ ID NO: 36602 - DNA, 201 bp, Bos taurus
taggtataagagagaaaaagattgatgtcaatagatatttaacaggtaaaatatggtactcataatatgtatttatttatttgttctgtcattaactgtaygtaatttgtacacgtgtgtgtgttgccaataagaaaacacaaaagcctacacaattaattttacatgttatgtgttttttattttgttttttccccatta

SEQ ID NO: 36603 - DNA, 201 bp, Bos taurus
cagagcttatgaaactacaaatccttcaagaagagatcaaaggaaaggatactttgtgtcaacctcactctattgcagattagttttctcttctcttcctrgggttggtttgcttataacttgaacaaggaaacattggcccctggagagagacagagatctcagtaaatgaagtcaaagggtaaataagatgaaaaaaca

SEQ ID NO: 36604 - DNA, 201 bp, Bos taurus
gcccaaggaattgacaatccactctgctctctggaagggggctgatgtttgtttcacaaacatacaaggttgtttgcctggaaccctgagtcagtcctcarggatactcccagcatgatgcccagtgtgaaaaggcttcttgatgaaagttgatttctcctcctcagccacatgacatccacagtagagagaggacacagc

SEQ ID NO: 36605 - DNA, 201 bp, Bos taurus
tactgaatgtgcccgtgtctgtaattaagaaacagttcgctactctcctctccataactgcccacacttaatgggtgaagtccctgctctattgagatggmaagaatctctaaggggagaaaaagacaataatatttcacagcacacaatgaattgttgaggacgccatgtgaaatttgtgggtggaaagtgctggccaag

SEQ ID NO: 36606 - DNA, 201 bp, Bos taurus
tgcttttctctagcaagtaaacataatcttaaatctttattaacctattaaggcaatgtgtctaaagtgagggtacgggttagtgaaaaaacaggtcaatmaggtgtctgctgagtgaagcctgaattagatcctgtgcattcatgaggcttagctgtagtgctgagaaagaaaagtgacggaggatccgagttccctggc

SEQ ID NO: 36607 - DNA, 201 bp, Bos taurus
cttttaaccattgtcttgcttaatatggtggtgatttactttaattttttttcttttttggttgccttggataggatactgtggtgcagatatcaagtcartatgctctgaagctgctttatgtgctctgcgtcgacgctacccacagatctataccactagtgagaaactgcaattggatctctcttcaattaatatctc

SEQ ID NO: 36608 - DNA, 201 bp, Bos taurus
gcatcattttcagttgactattgccgtgtaataccctacctcaaaacttattggcttaaaacgaaactgatttcctgtttttcacaatcttgtgagttgaytgggctctgctggacagttcttctgcttcatatggtgtagccaaggtcactcatgtttgcattcagttgcagttgaatcctggaatatcctcatctgata

SEQ ID NO: 36609 - DNA, 201 bp, Bos taurus
tgaggctacgacctttaaccctaaggtcctgcctggtccacagcaccatcagctccatctaaaggagtatctaggagtctgaggccagacaaggatgaagrgagggtatggaggacagggtccccagagcagggagtggagcctcagtggaaagaacgggagggcaggccgggccccactccctgcatccctgcctgtggg

SEQ ID NO: 36610 - DNA, 201 bp, Bos taurus
atcctcagatttcgctgtgagagtgaaatttgcaggcttttcccagtggagctcttgctggagatgtttgcaggccaggaaaattctttcttctctaatgygaggcagatgccacttacctaaaggatgatgtgatgagagagacactgtggtcgggtttctgggatctactctgtatgcagagtggctggggacatctgg

SEQ ID NO: 36611 - DNA, 201 bp, Bos taurus
ggtggatgtattgggaaattaatggctttggggacctgcctccaaggaaggatgcagttggtggatgaacatcccagtgtccctggcctttggtgtgatgwtcctgaagcatgttctgcagctgtttatcagcaggtgtcctgtctgaccgagccccagatgactcatcaagaaccctttgctggccttcctcccttccct

SEQ ID NO: 36612 - DNA, 201 bp, Bos taurus
gtttgttggactgaaatgatgtacttcagagtccattttggtgaatctaagactgaaagcccatggatggtggtgttggccacgacctgagagctgtgatrgcgaacctgcgcctggactgtgtgttgatttcattcagtgtgaattcctgccccttcctgccctcctttcccccagtcttttgatcttttccttcccagg

SEQ ID NO: 36613 - DNA, 201 bp, Bos taurus
tgtcccatttcaccagagagtcattgatccctggaactgctgacaaatcacaactagaaaaaaattgctcctgacaatgagaactggaattcgattgctcrtttcctggcccaggcagaaactaccttgattgctttccaaggagcctaccctccaaactgttttgggggaaaacaaggcaaacaaaatttaataacattt

SEQ ID NO: 36614 - DNA, 201 bp, Bos taurus
tctatcactactttataggccttggtcatcttccacatggcagatggagcttcctagaacaagagaactctttcctgaacattcaaatacctcattatttktctcttttcctgctgtggcctctgaatagattggtatcttagagcaagttttctatttgaagactccctctatccagaacattgatggcacaaatgactt

SEQ ID NO: 36615 - DNA, 201 bp, Bos taurus
ctcagactgcatatgctgtggggcaactaagcctgaaactgagcctgaactctctgcagtaccacaactagagagacgcctacatgccgcaacaagagccygcgtgctgcagctaagacctgatgaagccaaatacattttttaaaaatcaaaaaagaaagataagcacctgtgaactgcagtctgataaattgcactttc

SEQ ID NO: 36616 - DNA, 201 bp, Bos taurus
agaagttttatctcaagtcaatagtaaatccagaagtcatcaaaattaaaggcaccaaaaatttcctacccctttcttccctaaaactacaaagatagcakaagatatctttagttttcagtgaaagtggggtgtgtataggttagatcacagtacatgattccacagaatttgaaagggtgaatgggaaatgaccaagca

SEQ ID NO: 36617 - DNA, 201 bp, Bos taurus
gatttagagatgtcttttgttaggttcatgaggtgacttttggaataacttccattttcttgcccagataagtggggaggggagacacgctagagatggartttaattgccagtggtcaatggtaataattaatcattctatgtaatgaattctccataaaaaccagaaagaagagggttcagcaagctaatggattaaca

SEQ ID NO: 36618 - DNA, 201 bp, Bos taurus
tctggcaggctatagcccatggggtcacaaaaagttgagcacaactgagtgattttcactttcaatgggttgaacagtggcctcaaaggatatgtcccccyagaacatgtgaataagacatatctggggaaagggtctttgcagatgcatttaaagatgttgaggtgagctcatcttgggtgtgggtggccctcaatcaat

SEQ ID NO: 36619 - DNA, 201 bp, Bos taurus
tgtacctacccccagcccagcccaggagactgcatctaactccagtgttttcttatgtctcacagtcacccctcatggaagtcagtggttgtgtcattagygccctctgaggggtcttgacataggaagcactgttcattcaatggcacttgatgtcagaattctgagcctttaaaaatgttagctatgtttttttttttt

SEQ ID NO: 36620 - DNA, 201 bp, Bos taurus
ttcacatggagcccacccagggctaacaaagaggactgaagaactctgcctgcattaaccaagtcccttactgctatcccagccagagcttactgtaaagrggagaaggccgtggaaatgctgtgcctgctacacctgtgtctctggtccctgcctgagatgacgactgcagctgagcattttgtctgttttctgacctca

SEQ ID NO: 36621 - DNA, 201 bp, Bos taurus
tcaggaagggtaaggatttccacagaccagccgaaggtggcagtgcatctgaacactccttgcccctccacctctggcccagctgcagggctgtgggcagragccagtgagcgacagccacgaggctgctgctcgcgtcctgagagcacactcaggcttcacacccaggacttcatgagaggccacagccccacctgcaca

SEQ ID NO: 36622 - DNA, 201 bp, Bos taurus
cctggcaggagcttcctctgggcctctctacttccactgaggccatgctccacgccctctcattcccaaaccatttccgtcccacagctgacgtgtctgcyggacaggcacaccagtggcccacactcgcttgccactctgccacctccttcctgtttggagctctagaaggccccccacacccctgcctccatggatact

SEQ ID NO: 36623 - DNA, 201 bp, Bos taurus
gacatatcaccagactatatccatcgcactggatcagtcacattcttctagtctcccctctgctcctttattcaaaacaggtctccttctcccatttgcayccctggatatggacagcgattattcctaacctctgtctccactgggtcttctctattattttctaactcatctcacatttttcctctgggatctctttta

SEQ ID NO: 36624 - DNA, 201 bp, Bos taurus
tctagaaatggcagaaatcagatgtggtgatgtgtaaaggtgtgtgggccaagagtgatgggagaaaaggctcaaggtaggactcggagacacacctgcamgaggtgacctgtgcctggcggcctgcagacacggggcccggaggaaggccccccaggccagtcccacgacagctctgcaacagtcttgatgggggcttct

SEQ ID NO: 36625 - DNA, 201 bp, Bos taurus
cctttggcgttgcgaggggcagctcgggattcatgtaccagcctgaggccgggtacatgggggaagctgcctggaggcctgggctgcagccaggctgaatyagctgtgtctgtggacacctagaccagtctctgtggctgagaaccacggccagctgtcttttcccaggtctgtgcttggtgatctgggctcagcttggtt

SEQ ID NO: 36626 - DNA, 201 bp, Bos taurus
accctggactggcaactcgtttcttacatgatattttacatgtttcaatgtcatgaaaagagaatacagaggaaggccaccaagtagatgtatcacattaygttgtcctatgtcctccttgatggattccaatgctcatccatcttctgctgtcactgatgccgctgagcatcctggaggaggccacattccctcttatac

SEQ ID NO: 36627 - DNA, 201 bp, Bos taurus
agttttttatgtcttctacaagtgaactttgctggttagagaaataaaacaatctatttccttatcttctctcatcttttccagattgaaattcattaaayccggctttcctgaacataaatcaataccatgtgggatgttatttattgtcagtaacaaagtggagtgtgtggtatggcataggatgtgatcagaagacac

SEQ ID NO: 36628 - DNA, 201 bp, Bos taurus
tgccagtttatatgttgaagtttctacccctagtaggtcagaaagtgaatgtatttgaagatagagtttctaaagaggtaactaaattgcagtgatgttayaggcctgactctaatcccataggactgttgtcctcataaaaagaggaggtcaggacgcagccagacagaggcaagaccctgttaagttacaggagaggac

SEQ ID NO: 36629 - DNA, 201 bp, Bos taurus
ttccctgccagacggtttgtttcctattatggcatgtgaatttgcacacaggtgggccctcttttgcctctcagggtttaggagctttgggtaccatcgayagacatatcccagcatggtgctgccaagtcataatcgtgaccatttctgccttcttgttgcagaagtgtttcccttttgcttctgctgtcataactgaaa

SEQ ID NO: 36630 - DNA, 201 bp, Bos taurus
gggcagatgtctgttttctggtccctgcatgtccacaaactcccagtttatttggctacattagccactcccctaactaacagtcacctaagatgtcccayctgcagtggtttagaaaatatatcttaaatcaattttatcattttaagggcaatataaaatatatttaacaaaactagttcttatattactttatgtgga

SEQ ID NO: 36631 - DNA, 201 bp, Bos taurus
gcttaaaggaaatgtgctaccaggccatggaaagaactttaaatgcacattcctaagtgaaagaagctccctgagaaggctaaaggctgtatgactccaaytgtatggccttttgaaaaagacggaactatggagacagtagaaagttttagcgtttgcagggtgaagcagcagttaaagttgaagtttagtcactcagtc

SEQ ID NO: 36632 - DNA, 201 bp, Bos taurus
ctaactttgtcctgagagaattcgtcacatttctttttctgaataatctctttaatgttcaaaaatcattactattcttccttgagttcccaaattcaccrccataccaacatttctaattaaagagtgacaattctgttcccatattttattaaacacacgtaccagtgcatgcagaaggatatgtatgtatgcacatgt

SEQ ID NO: 36633 - DNA, 201 bp, Bos taurus
agaattccatggactacagttcatggggttgcaaagagtcagacacgactgagcaactttcactttccagtcagtcctgtttgctggtgagcacaccctcrgttcttctagacagctggccccaggctggtttaactcattgctctctttctctttcacccccttgagcctcgtgcccaacttaaagggggacctgcacac

SEQ ID NO: 36634 - DNA, 201 bp, Bos taurus
ttcattttttaaaaagccaagtaagagctaagtagtttttctgttgtcagaatcacagcccccaaaccttaatcttatactaattagaggggtttaatagragaatatgttaagaaaaatttaaaacacgtttcccacaaaaatttttatataccagaaatggaagagacaaattcagtcctttcatctctatctgattca

SEQ ID NO: 36635 - DNA, 201 bp, Bos taurus
cctcttgcagtccagggtgtggcccgggaacacccagacctacgcggcttgtcctgctccctggaccctataggagagaggccagctgccaggtgactagwtgtatacacaggccaacttgagagcggagacaaagatctccagagcatgccttggaaggttaactcattctcagctcatcatttcctgaagctttttcct

SEQ ID NO: 36636 - DNA, 201 bp, Bos taurus
ttgaagaagaacttcacatagaatgcctcaattcatatcaactcattttgtatgaaaatctcaaggtctttataaaagggacagttcacctagacacactrctcagtgtcaagactgctagtattcaccttttagtcagcactttcccccaccagtcgtagtttctcaagtcctgaactacatggccaagccatttatttt

SEQ ID NO: 36637 - DNA, 201 bp, Bos taurus
ctgttgttttccctgtttcatagatgagcaactgagctgagttccgatgcagtttaacagcttcccctggtcatgcggttcccacatgtcgggcccaggcrtaaagccaggcattctctgactttacgttttggaccggtgcttattgatcatagtgcactgcccatccccggctgggccagaccagtgacttttaattct

SEQ ID NO: 36638 - DNA, 201 bp, Bos taurus
ccttctccagttgagggtattagaaggatgcaaacccagtgtgacatacaggtcaccatgggacccttggcttatgggttggagaaatgggccatgaccarccatggggacctccagcactgactccactagactcatgtgagcagcaagtcatctccagcctcaccgcgtagacagaggtgggagagacagggaaacaga

SEQ ID NO: 36639 - DNA, 201 bp, Bos taurus
ttttctgataatttttttttttctgtaagccttctaaaaaagaaaaggatagttctcttttctcctttcccagtagaaaggagacatagaaaagcaggccraggtagagaattcaacatccccacacatatatcttacatactttattttgattttatgcagagaaaggacatttacttataatttttgaatgaattgcca

SEQ ID NO: 36640 - DNA, 201 bp, Bos taurus
tgtggcccctagacaggagagcttgctgcagtgggatgctaggagaagcaggggaagggccaccaagggcagaaagcccaccatgaagaatcctggccagyccgcttgcaagattcctcaaggactttccctgctgtcccagaagaaactgttaacaagtttaaaggtcactcaggccacaaggatccttggcctaggtca

SEQ ID NO: 36641 - DNA, 201 bp, Bos taurus
gtaagctactcattacccctacatttaagtagattatttactctagagtcctttgtctgtgttcttttttacagaaaaagtcactgaacttttataaagtygacttcagtctgcaacagttctttccttaaattattgttctccctccaacaaaggacacaaacaaaaggaagggaaaacaaaaaccaaaattatcattat

SEQ ID NO: 36642 - DNA, 201 bp, Bos taurus
accttgaatacccttttgctagtaactgatggattcagtggttagtaggagagaagttttgactaagtctgtagcccacccacaattgaaaataggaagtkttaatcctccaaatgtgaaggattttaatttattaagttttggaaaaacaacaaagagcataactttttaagatttactaatcaagtgaggaactaaaga

SEQ ID NO: 36643 - DNA, 201 bp, Bos taurus
cattttatctcacaaaaatcaaattggattaaaatggattaaagacttgaatgtaagacctggagccgtaaaactcctagaagaaaggcaattagttcctrgataccaatctaggcaatgatttttcaatttgaccccaaaagcaaaggcaacagaagcaaaaacaagcaagtagaacaacatcaaattgaaaggcttctg

SEQ ID NO: 36644 - DNA, 201 bp, Bos taurus
aatctcaagaagatgtctctagctgtatgatcctgccttttgggaaatacaagttaattttccagaatgtttagaaatcagtgattcataatcgagtcacycttgtgtgcctggcatcttcacatgtttttactgaaacatctaactccaaagtagggactgtttccatttgttgatcaaaagtgggcagaaggaggtggc

SEQ ID NO: 36645 - DNA, 201 bp, Bos taurus
tacgtgaagtgttcttaaattttaaactaataagtagtgactttattggcacttagccatgtctgtgagtaggacggccgtgtggttctgagggtatgtcrtggagagtgcgacttctgttttctgcttgtgccttgttgccgtgatgtatacaaacggcctccagattccagtctcctcccgggtcagtaaggtgatgac

SEQ ID NO: 36646 - DNA, 201 bp, Bos taurus
ctctctcctccccttctttgagtggaaatgctcacactctgacatacaatatcaaatgtcttctcttctgagaagtcttcctttattatctgaagaagagyttgctgagttgctcactgtgctagccagagaagtgctgatacttagtctttatagttatataattcatattaaatcccaagaagagaaagaacagatcac

SEQ ID NO: 36647 - DNA, 201 bp, Bos taurus
gagcatggaagtgatgacgtggatgctgcttgctgaggggccaggccagggcaccagcacttgtggtgcttcctacaacctcagaggtatcagcatctccrcgcctgtgcagcctcctgagggcacacggggaactggccaacggagcaaccaggaccgcccatcagcacgagtggcaactacccccaaacaaggccaagg

SEQ ID NO: 36648 - DNA, 201 bp, Bos taurus
tttctaccacttctctgggcaagactcagacctactgattgtgtttataattaaggaataacgagaaatacgactcaggggtacagataagcaggtacacrggaaacatccattttccttaaccttagtagatttcactgctcacttgcatgagtgcagaaggtataaatctctaaggaccctttactaaaatcgggaggg

SEQ ID NO: 36649 - DNA, 201 bp, Bos taurus
tgagacagcccctgagcaagccaggggaggggccaggccaacccatggcactaaagttgcatgggacctggagagcaaggctccatcacagcataacaacmcctctgtatcctggccctcggtcaccccacggggcccaggctcctcctgaagtgtgaagcctgaccctgctgggggctaagagccacacccagagggcag

SEQ ID NO: 36650 - DNA, 201 bp, Bos taurus
gctgaatgtgattaaaggagatagaaacttccagctctttcctctgggaatgttcttatgagccagaactagaaatatcctccttgtgccttgactaataraagaggaatgggtaataactcattaatttgtagcagacaaggatcaaagcaagagggaaatgttgagataaaactttccagagcctgggcatttaaatgc

SEQ ID NO: 36651 - DNA, 201 bp, Bos taurus
taattttatcagtaataatcctctctcacttggcccttaaattcctgaagattctcacagttgagttaaaagcacgagctgtagaattttaaatctaacargtcctattagtgagatgttattttctctgggatcattttttttttttaactatccctgggacttccctggtggtccagtggttaagactttgccttccaa

SEQ ID NO: 36652 - DNA, 201 bp, Bos taurus
cagcagacagccgtggaagtgtttctgaagggagtctttgtatcatcactctgaaaaaggaaaattactgtgtttgatccaaaaagaaccttatctgagcrcacttcctctaatgtgctctatctaccttgtaggtgcatagtacaggcagaagatgtaaatcttggcagctcagggcagagggtcttacctgctagccta

SEQ ID NO: 36653 - DNA, 201 bp, Bos taurus
gggctgtgagaatgaagaagctgagctgaggggctgttttgaggcaggagggctggttgacggatgtgggttagtggttggggtgctccacccagggcccytccactcctctgagctcaccgaggtcactgttctctggggtcttgtctgacacactgccctatagggtcaaggccaacaggagctcagccaacaatgtaa

SEQ ID NO: 36654 - DNA, 201 bp, Bos taurus
atatgtattatataatcatagtaggtctagatatagagactatactatatataatatagtacacatagctatcttataactggcataattcaatatgtgayatggacagttgacaatcatcagacaaagcactatatatgtatatgtgcgtatagacatagatacagattactgtatctgcagggtatattttaccttata

SEQ ID NO: 36655 - DNA, 201 bp, Bos taurus
tatttaatgcttccagtgcctgtgcaaaattgtatacacaatggagaagtttttattttcaaaaattccactatgaactccttttattgcaaaagctttcrgacctcctgaaacattggagttgataactggtttgtgactaaatgatccagagttgatcatggtttcatttctgggtgactccagcagtccgaccttttt

SEQ ID NO: 36656 - DNA, 201 bp, Bos taurus
aggccccttgccacctggatcagactgtaatgatttggacttgatctatccctttacctttagaaaccccctactttatttttcactaaatcatcaaaagyctcatgtacattattatgaataccaaacagagaggtgatttattattactttgcatttattttgtattttccttcaagtacctaaaggggttttacaaaa

SEQ ID NO: 36657 - DNA, 201 bp, Bos taurus
aactcaaactgttcagcctagactaattgatccatcattaaaagagtggcaactagacatcaccacctccagaggcgatgcaacaagaagacatggcaccrtctatgaaatatcttggactaactgatcttggactgaaagtgtaaaaatacaataacagagtaagttaaacttcaccacaaggaagtaatcaagcaatct

SEQ ID NO: 36658 - DNA, 201 bp, Bos taurus
gtcccatcaatctttgtcaagaaggaagtttcaggggagggtcgagaagggggtcttccgatcctgttttattctttcctcttttgcttcagggcccatgrctgacgactctccttgaataatataaattctgcctgatcttcacatgtccatatctgtaaatatggggccacaagataattaaaacctcttaagaaagtg

SEQ ID NO: 36659 - DNA, 201 bp, Bos taurus
tttttttcattttcagaaatgagatctattatttcaattttaaaagactatctttttcacttgatatcgtcattgttaattcctccaattgtcagctcttrtcatcacatttttggatcagctgttaagtcacatcagcctactgtgctccagccaggcccctgcctcttttgccctctcaggttctcacttccatgagcc

SEQ ID NO: 36660 - DNA, 201 bp, Bos taurus
tctcatagtcaaatgtttatttaatactgacagtatcaagcactgttctagatcttgtcatataaatgtggggtacttgagggttttttcctaaagcagargtgttgatgaccttgtagacttcaggaggaattgaattttgttgaaggactttataccatgctgaggacttgcaaatttgtatactcacgctggaccttt

SEQ ID NO: 36661 - DNA, 201 bp, Bos taurus
taacgattagtgaggttttgtgaaatgacagatagcattcttggattatattcaatttaaaattacaattaaagaaattaaaaatcacttaactccacatytggtgtcaaacctggggcttaacgggtttcccacgcgtctgagaattcattagcgttccttctcctttgttctttctcgtgtcttgacttcatgcttagt

SEQ ID NO: 36662 - DNA, 201 bp, Bos taurus
atggagtttaggaattaagtcactgggtgacatgctaccatcttttgctgaagaccaaactcaaatcctgctctcatttaagtggccttttccagttactytagtgttctatgaactctctaaactgtgactttattttctatccttctcacaaaatccattatgtattccactagattgtacaattcatggggccaggcc

SEQ ID NO: 36663 - DNA, 201 bp, Bos taurus
gagaagcttgcagcctaagacagggaagagttgttactccattggtggtgttgttactccattgtttctccatgaaccttcctatgacataggaagtgacrctgaaataaatcagaagaattgcatctagcctttccaggatggaaaaggaactaaatcctcagatctttctagccaagtgtctgtggaggaagatactat

SEQ ID NO: 36664 - DNA, 201 bp, Bos taurus
cactgccacagcccacagtggaaaggccactccagggattttttttttttttccgacagtttagagcaggaagtttattcatggatgtgtggaggacatgrtaagggccctcggactggaaggcaaaggggcgatggatggggactgagaacagacaccccaagtcagattctgtggagtcctcaggaacctggtgtgtgt

SEQ ID NO: 36665 - DNA, 201 bp, Bos taurus
ataagtaaacacgtagaagcttcctagaaaaaaacaatacgtaaggcggggggcggggggtggggatggtgggctcctggcctttgaaatccacctaaggmgatactaagtgaagtctcctacctgaagtccaccgccctcgccagtggaggaaggcaacgtgtttaaacaggatttgcttgtattaataggcacttctat

SEQ ID NO: 36666 - DNA, 201 bp, Bos taurus
catgtatatatcactagcttccccaattatcaactcgtggcatacatatccttttccatgttatttttgggaaaatcccagacactgtattattctatccrtaaatatttcagtacgtatctctaaagataaccacagtattattaccaaacctaaaattagccgtaattcattaatattatcaaatatctcatcagcatt

SEQ ID NO: 36667 - DNA, 201 bp, Bos taurus
ctacgattggcagcatctggatttctcaaggtttaactctagaattaaaacatggcattttcttctgagcaatacatccattggatatatcatagaaaatkaatcaacaggacttcatttagggataatctagtcaattaactataggacaagatcaattaaatctcacccatcttccttttcggccgacagaatcatttc

SEQ ID NO: 36668 - DNA, 201 bp, Bos taurus
aagttccaggtagtaattagagtattttaaattgtgatgtgtgaaagttatgaatgatgatgattcttttgctttttcattgttttttttccccaaaggtytgtttggggttagtatcaagaacatcttattcttgtaaaaattaaaagactgtgctaaatgtgcaatttttaaacacttgtctcactgtatggaaattca

SEQ ID NO: 36669 - DNA, 201 bp, Bos taurus
caaagcctcactctgttccttgcgggcttttccctggataaaatctctctcacattccagtggatttaccctaggttgtccacaagagcctcttcagtgcragctcgctgaagctgctggtacaggggatgagacaggacatgctggaggtcaaggtgcccttcccagccgcctcctgggcttgcagagctccttcatcaa

SEQ ID NO: 36670 - DNA, 201 bp, Bos taurus
ggttgcatacactagccctttctgtctctataatcaggttcctagtggaaagaaaaagaaggaagttagaggctaggatgagtggcttcagaggtaagaawgaggacatagatgataataatgaacaagctccttgattttagcaaatctaactactggaagaaaggataaacatccttcattaagaaaattcggagactt

SEQ ID NO: 36671 - DNA, 201 bp, Bos taurus
ttctagctaggagagtataactgggtctggacttgtcttcctgctataaataatcaaaactggacaaaaatatatgggcctgctttcagccattgagtaayagccctgcaggactgcgatcccagagaacaactgccctggctttctgcctggaggcactttcctacctggcatgcagggcattgactgagtcagggccac

SEQ ID NO: 36672 - DNA, 201 bp, Bos taurus
tggcagccaagttcatgaccagccactcatgtcttgaagggagacaatcacctccctctagtacatcttctcagtgcatcttctctcctcggggttacaayttccggctcatcacttagacagatgactgggattagggtaatagaagccacatgctggagacatgtgtggtattggagggttcaagttattctgtgggca

SEQ ID NO: 36673 - DNA, 201 bp, Bos taurus
tctatataatttatcatccaaacaaggacactttgagagtgaaaagcaatgctattaataattgtgccaagccagtaggaataaaccaggattgtcccccmaaataaggacatatggtcactgtattgattacctcatttcaatattaccaagacaacatcggtaccctttttctgctttcttttgctacctgacttcata

SEQ ID NO: 36674 - DNA, 201 bp, Bos taurus
aagtataattcacaatagaaaataatgtcacctgtagaaagacccatgcaaataacatttcataactaaagaaaagccagtcctttaaaagtcattgtccytggtttcatccttctggatatttttccagtctcaagctctctgtttcttcaaatgtctgtctagcaatggcaccccactccagtactcttgcctagaaaa

SEQ ID NO: 36675 - DNA, 201 bp, Bos taurus
cccaacttaaatcacagtggtaagaaagggaggaggtgtgtcccaacctggatcccattttccaacaaaaagcccatttccagcacactggcccacaattygggctcctgcacgaatgtgcctcacaaataataacctcgctgcacatcaagctgggaaatgaacactggcagagtcctgctaaattcccttaaactggcc

SEQ ID NO: 36676 - DNA, 201 bp, Bos taurus
agacacaactgagcgacaaaggatgcacaaagtaaatcagaaattcatatttcagtaaaccttcactcagacacatatttgaagcagttactgatattttyccctgtggaaagtccttgtatttcccatccaccgactcatcttccttagtctctttcaaaattaacctcttgcaggaagcattctctgatcaccctaatc

SEQ ID NO: 36677 - DNA, 201 bp, Bos taurus
cacacatgcttttataaaatgcatcttctatcagaagaagtattactcctgaaatactaattaacaaatgttttaaacggaatttagatgttcccctaaaytgatattctgaaaattttcttcacagagattcagggttaaaaataaaatgtaaaaatgattttttaattaaaaaaataaaaataaaatgtaaacaagttc

SEQ ID NO: 36678 - DNA, 201 bp, Bos taurus
aaggctgcatggagggacagctgtgtagacgcgatcagagtcctttctaggaggacaggcctgagtgggggcctgggaggggaagagacactggtcaccaragggcagagagaaagagaacaggaagagagaagaagaaaaacagaaggcggggaagtgggagggaggctccgccactgaggtggcctttactgtcctcac

SEQ ID NO: 36679 - DNA, 201 bp, Bos taurus
gtctcatcataaactacttattcgggagcaaacagtcactgtagtcacttggtattaaaaggtacaactcacagctgctgttcacatccccaccccaagayatttagcttatcagatttcaagcctccccttaataccaccataagagaggaaaatctagtagtacgaagagcacataggtggaaataagtattcctaccg

SEQ ID NO: 36680 - DNA, 201 bp, Bos taurus
aggcctcctagggggagagtccatgctgagaatgaggagcatcagcagggagaaggggtgttgggatgcaccaggggaagggaggaggaagcatgctccargcagagagaacagaagcacaaaggccagatggcaaaagagcaggagtccctggaaatgtagcgtggctggagaagatgcaacagggaggagggttggcag

SEQ ID NO: 36681 - DNA, 201 bp, Bos taurus
gtcttagttctgagcctgggcctcaagaggcttatgtgctcctgctcttttggaaagtttagagcttgaagaattgagtcatcccaactaaaccaccctcyacctggttgactgtatacttatgagcaagcccagctgagatcatctgagtccaggctggaccaaaagaacccacccagctggacctagcctaaattgcca

SEQ ID NO: 36682 - DNA, 201 bp, Bos taurus
tactttaaattttcaagcctcctattgggaggcttctaattcttaatctgccactgagattttgtttgtgatgttcagtgatctaaaacaataaaatgctrtaagtatttacaacaatgtagcaatcagaagcaatgaaattttgactagatattttcattttcagagaatttgcaacaggcagtaatgcactgaatactt

SEQ ID NO: 36683 - DNA, 201 bp, Bos taurus
taaacatgatcagcaaggatgatttctcttgttttactaacactgatagagttctaatgtctgagtcaggcttgtaggttacataagtcaccaaccatgcrggtgctcaagcagttgtaaatcctgcagctgtctatacctgcacctcccagagccacagaacacactggtattttacaagtgaggtgcagactgcactgc

SEQ ID NO: 36684 - DNA, 201 bp, Bos taurus
ttcactggtcttgggcttttctatattatagatattaacttggaggttcacttaagatttgatttcaggtaccaagatgcccttgatctatgagtggttcmctcagtgaagcagatggattagatgctgtgagggaggaagccacagctgcctgcaggtcagaccagctgaatccacttgagagaccttggtggggagaaa

SEQ ID NO: 36685 - DNA, 201 bp, Bos taurus
caatacaacactactgtagagcctcagtgtctattgctgtgcccagtgccaatctacagcctctctgtcacaccccagcgccttcttccctgttgccctgygctctatgtcagagtggcttgtgtctgctcctggaggctcttgccccctggcttcagtttccactgagacttctctagagagaataagtacttgaattga

SEQ ID NO: 36686 - DNA, 201 bp, Bos taurus
aatttagtgtcctattagagcacataccctgttttgttaatcaactgatttgtttattaagttattaatatgttctctttcaccacactcattgcataaakcttcatagaagaaaggtgtgaagtgaaatggtttcagctctaaggacattctggtctcttaggaagattatctgtacaccaagttgaaaactgttaagta

SEQ ID NO: 36687 - DNA, 201 bp, Bos taurus
cagtccacggggtctcaaagagttgaacaggactgaagtgactgagcatgcacgcacaccagagcagtttcaagtggttcctcataacttcaggaagttakctgaaggccggagacagcacacagaggaggggagactaactcaaggtgtcgagacgcagcatcacagtctccgagggtgtcagacaggaaaagaagcacc

SEQ ID NO: 36688 - DNA, 201 bp, Bos taurus
gaatgccatagcaagaagataagccagcagtgatgctgagaaaactgctccagtggccttaagcagatgagtccagcctggctcgctgaaccctgggcttscactgactataaacactgtcgcctggaagcattttgttttataatgtatgttgggagaggcttaatttttttaatatgttcagtagtaagaatagctatt

SEQ ID NO: 36689 - DNA, 201 bp, Bos taurus
atgtgatgtcacacaattcatacagaaagtgttattaagaaaattagttacttagttctggagagaaacatatccaacttaggcgtttgtaagaggaagamctagagtttgaattatgttctctccactctacatcgtaagggctttctacagtttcatgttgctggattaactaataaatttcccgattcactcatgtat

SEQ ID NO: 36690 - DNA, 201 bp, Bos taurus
caacgcatgtcaggaaggataaggccatgttgcaaggggtttttgtctccttaggtgcatggattttaaattaattcactgtgtaatgagggacaatgatmggtttggtttctttaaaggccagaccaattgattgtccaaacttctccatgctattttttattgactccagaatgaggtcaaaatcatcacttattttca

SEQ ID NO: 36691 - DNA, 201 bp, Bos taurus
gcttgggaggactcacatgggtatcccccaagggctcagcatagaatgaggagacagaaattcacgtctctcagccttttccagaaagaggccagtttgcrtatcttaaaagctgtagcctgaaggtcctaaactagcatgcactgggggactgagtgtgattggagaggccggctggagtcatctctacattctccctct

SEQ ID NO: 36692 - DNA, 201 bp, Bos taurus
ctttcctctcattcttagaacttgcttcccttccatttggctggtttcaggcagagggaagaaaatctgttaataagccaatatctataatatgagccccrggtatccctcccttcccaggtggtgctagcggtaaagagctcgcctgccaaagcaggagatgcaagacacctgggtttgatgcctgagttgggaagatct

SEQ ID NO: 36693 - DNA, 201 bp, Bos taurus
gcagtgtggcctaagattctgtgagaaggaaaaggaaacacatacctagaatatttattaattataattaattgggataaattacagctctttccagagtrgaagaggcccaatgtaatagactggccagcatggggctggtggatgtttttcaagggatagtgctgcagcaggggctctggattttttctgggttgccat

SEQ ID NO: 36694 - DNA, 201 bp, Bos taurus
aacaaggactggaggcaaaccagaggctagatgagatgaggacggattttccctgctggtttcacagacagcaggccctacagacacctcggttttgaacrtccatccctcagagctgtgagcaatacattcatcctgctttacgccatgcagtttgtgttacttggttacagcagccctgggcgactaacagccacggct

SEQ ID NO: 36695 - DNA, 201 bp, Bos taurus
caagaaaaaagaagtaaatatttagttaatggatgtattaattaactcagtggcaagaatccattcacaacataaacatatatcaaatcatcatgtcataygcattactacaaatttatctgtcaattatgtatcagtaaaggagaaaaatgcatttctgtgggcagcaaacaaaaattgcaatggagcaattccttcaaa

SEQ ID NO: 36696 - DNA, 201 bp, Bos taurus
gataactaaatatgagggatgatagtcaaatttgctttaaaatggatttttcaaagtaaaaccttaaagtttgatggtagaggttgttttgtgtgtttttktttttcaaataggcaaaaataagccagattaagaaaagttatataagaatcaactgtattactggactttttccctccaggattgcaggcaacttgaaaa

SEQ ID NO: 36697 - DNA, 201 bp, Bos taurus
gatcttctagttgaaaggatcgcagtaggcctcccaggtcagtgcttcgcaaactgaatttggagacttcaaggaacccacagaccattcttagggagacygagggcctatcttctgaccatttttgttctctttctgttttcatgcatcttgatttcagtgtctctgtttgcacttaggtttacatgggcttaccaggtg

SEQ ID NO: 36698 - DNA, 201 bp, Bos taurus
gcccaggtttgtcagtttttgaccatcagcaaatgtgctccagtatgagagcacattgagctcctgaaccactaacctgctgaccatgaatagaaacagcrgccaccaggacccaaaatacattataagtgattactagccatagtacaatcctgcttgcttaaatctaatgagtatttatatatatatttcaaagtagac

SEQ ID NO: 36699 - DNA, 201 bp, Bos taurus
gggaccagaggagcaggccaatgtggtgaagaaccacactctcctgcaagtgactgctccaagcgtaggtgtggggccagtagggcaaccagaatccttcyctgggcttgtatgaatggaagcatggagagaaaaccacctttccttttgcatcagcaagttggaatgttaaaagtctggtactacctgaggccacgctcc

SEQ ID NO: 36700 - DNA, 201 bp, Bos taurus
cacaggcaaatgatttctttagcttagtgttctaaggcagtatttcaacatcaagagtcgcaactattagggcaaaaacacatttgggccctggacaattwaattttatataaggttaagtttctaattaatacgggtctctttttggtattaaacatacaacctaaattaaagggtttaatttaaaaatttacttgcatt

SEQ ID NO: 36701 - DNA, 201 bp, Bos taurus
acaagcacaacctagctaagacagtgggcagcaaatgtggtaaaagggaaagcctgagaaggctcccttaatttctgcctcgatctaaaagaaactatttmttttttacctttaagaaaacgaagcggtgagcaagcagagaatgcattcttatatatatggtaccatcatttttagaaaaaagccatatttatgcctctt

SEQ ID NO: 36702 - DNA, 201 bp, Bos taurus
agtcgcgttaagtcctgaacccgtattctgattggaactagcatgaaaactcctctctggtagatttgcaactgcatttaataaggtgactaaaacgtccrccctggccgggacgtttctcacgtggagacagagtgcaattttatcttgggaaagcactgaggacacacttcttgaacacatacaatactgaggacattt

SEQ ID NO: 36703 - DNA, 201 bp, Bos taurus
ttgctgaatctgtcaatcaatcacacctccaataacaatcaatcacatccaataactgtaggtcccttgagtcagaggctccaggcccccgtcatttctcyacgagcatcattcaggttacccaggaatcaggatttccaaccatgaagaggttggcccatcagtcattcacagcagttagaactcagccgcgttcatttc

SEQ ID NO: 36704 - DNA, 201 bp, Bos taurus
acaaaccgtcttggtgggcatgggcacaacataagactgacttacataaatgagacaattacagagcagccaagacaatgtatgaacataaaatactgcayaacaaaacgaaaaagtctggaaagcagaagcccacataggctaaaggagcaaggaaaacatggaacagacgttttagaactgggcttgaagaatgaataa

SEQ ID NO: 36705 - DNA, 201 bp, Bos taurus
aataatgatgaactttatagtatttcagtaacaggacatcaaaggtgaaatagaaacattccccaagaacctggccttctcttgtggggaagaggttggtrtgttttcagttgtatgaaggatagctgcattgtggtatgtagagttatgactttgttattccttttatttggaaactgtgatttttaagagatgggtgtt

SEQ ID NO: 36706 - DNA, 201 bp, Bos taurus
tttttgcaaggccatctgatagggagcaatggccccaaggagatattccacccaaagtccacagatttacagtcacatacatgtttattttagggggaaakaaccccaaatttagtcaatatgatagtataattaaaatttgaaattactgtcaagaaatgcaaggtataattggataaatgtttagtgttaaaacaattg

SEQ ID NO: 36707 - DNA, 201 bp, Bos taurus
ataaggatgtagctatgaaactgtgctggtagtgcaaaggctacttagaaaagtacccttgttgctattagagaacattggatatggtcacagcaaataamaataaggatttttctcttctatggaaggaaaaaagataatattatatgggtctgggaaatcaaatatgctccttaaaacaacccaaaagtaactgctatg

SEQ ID NO: 36708 - DNA, 201 bp, Bos taurus
catttgtgcttggcagcccaggtataggagcaaacagacaacattgtgaagtcagttgtgctgagcaggtgtggcagcagttcaaagcccaggcagtcatrgagtctggaaaaagaatgagccaaccaagttcgaaagcagtgtttctaaacagagatctaaatacagctatataatcacagagctaatgaatgactcatc

SEQ ID NO: 36709 - DNA, 201 bp, Bos taurus
agccttgagccacggactgatccaaacttgggctaacacacatgactgtatcagcaggatgccagtttgctatgcttcttcctggccatttcccaggcagyctcaagaaggttgaaactctgggttgtgtcatgcagtcagtcaactgagatttataaagcacaggccatgtatcagaagtgggggtagaaggattaggaa

SEQ ID NO: 36710 - DNA, 201 bp, Bos taurus
ctagttccctgaccagggatcaaacctagaacccctgcattgggaactcaaagtcttagccactggaccaccaggaaagtccctataattttttgagatgmggatatatcattttcaaagacttaggatgattaagtcatggatcactcagagtttttaccttataagataaaataatggagatttgtcaaggctactcag

SEQ ID NO: 36711 - DNA, 201 bp, Bos taurus
ggtatggaaaaaacagatagctggcttcaacttgagtagattttcattgttttgttttatgcctaatagatacaaagagcaattcttctctagaatagatkgggcttttcttctgttttgctcctataccatacttaccctttatgacattaaaattttagttagtcacctgcctacatttttgtttaatttgtgtctttt

SEQ ID NO: 36712 - DNA, 201 bp, Bos taurus
ttgcacagagaaatcccatggacagaggagcctggcaggctacagtccatggggtcgcaaagagtcggacacggctaaagtgacttagcatgcaccaggcrctgaggtttgtcaatcccctggcattattttatcccttccttcagatggagccagtaattagaaatctaagtcagttctgaattaggtattcatgataac

SEQ ID NO: 36713 - DNA, 201 bp, Bos taurus
gaggagtctggtgagctacagtccatgcggccacaaagagacacaacggagcacacatgcacactggtttccggagctgcaccttctcctgccaggaagtrgggccccctccctgaagtctgatctcctgaaaatgatgcccgccacagagcccgccaaggcggcccgagcatgcgcagagctccccactgaagtcaaaac

SEQ ID NO: 36714 - DNA, 201 bp, Bos taurus
tttttccagccaacaaccttaactatctagggacagaatcctcattttctccatcctgaatccattgggggtggagaaggggacggctgcagtggctgacrgcttgatggctgttttctgatacagcaggtgacattctatgtccacagtttaatagtgaggcgtgtgtgcctggctaagtcacttcagtcatgtccaact

SEQ ID NO: 36715 - DNA, 201 bp, Bos taurus
atgggaaggggatagcgccaggggattggctggcgggctaggcgcccgggcgggggaggggcaagtgagggcacagtgaatggcgctgtccctaccttcgstcgcatagagctctccggcctccaccagaccccactgtctaccttgatcacttaggaaacgctgctcgggttctgacccgaaccacggttgttatttttt

SEQ ID NO: 36716 - DNA, 201 bp, Bos taurus
agcaccgttttttttttttttttttttggctacagactcttcagaagtgtcagttggggtttttggtccctttgtctctcttgggttcagaatttgccccmactgctagttagttttagtcccatatagtttctctgtattttgttgctggagaagagatgtgtccaggtccaagcactgcagcaaagggttccaggtccc

SEQ ID NO: 36717 - DNA, 201 bp, Bos taurus
cacagacttcaggcttggtctgtcctctctcgctgtctggtttcaaggctttcacacctccctctgacaccctccctcctgggccccggccagtcagcccyacctccaccctctgtccttaagcatctgccagaccagatgtgcacaggtgcagcctatgagccccctgcagcctggcctccaggccacacaccaccctct

SEQ ID NO: 36718 - DNA, 201 bp, Bos taurus
ttgtattgtctgaattttcctcttgtaaatcaagcaaactaataccaatttatatgggaagcttgactaaccctatggataaatgctgaaagccaaaagaraagttatcacatttaacaaattcagtagtgataacattaacacatatttagtatcaggatactgatatatcaatgttaaaaaaatgcttactaaacagtg

SEQ ID NO: 36719 - DNA, 201 bp, Bos taurus
cagagcccataaggccacgctttctaccctggaaacacccgcaggtgaatgtgcagagtatacatccctattcctggtccagtattggccagcccgatgaygtttcttgtcaagggtcacacaggtctacttttccttgaggaatcaagagctggcatggcctgtgctctgtgtcataggtctgcctagtccaactttccc

SEQ ID NO: 36720 - DNA, 201 bp, Bos taurus
cttgctaggctgtctactggccttgtgaccttcttatgccttggtttcccacatgctcagtgttgctatggggatgagaggagacgactgatgacaaggtygcggcacgggtccaggctccaggtaactggccaaaaggtagcaccccaactgctatcctcacaccaaaaggggaagggcgtttgcactgatgtgtgatat

SEQ ID NO: 36721 - DNA, 201 bp, Bos taurus
tactagcagcccttcctcttgggccatatcatcaggcagatcctttggtgttagtgtttggtgtaggtggtgagaaaagatgcaatgtgaagactgtggtraggcccagtggagggatcacaatgcagggctctggagtgctgacacaaggccatagaatctgcagaagagaattatagaatttttgagaaacagttactt

SEQ ID NO: 36722 - DNA, 201 bp, Bos taurus
ctgatgtccccattaaatggattgcaatatgattttatcctttctttctgatttcaaattttgtgcttttgttttctctccttgtttatcgcctctttctrctttgtgtctatccgcttgtttctgatctgctgcctaaatttagtcttgcctttgtccctactcagtgtttctacaaagtcagttcttatgccaatgtat

SEQ ID NO: 36723 - DNA, 201 bp, Bos taurus
gttacgtgactgattgggttgttcatattccacatgtttggcatgtataagcagactctggttatgttttcagatagggaaatgcaatgtgttacatgtgytctcttgggaccccaaaactaatggtgtcaaatggatttttctcatttgatccccatgaagacagtttaatttcactcatttttctagtcccacaaaaat

SEQ ID NO: 36724 - DNA, 201 bp, Bos taurus
tccatgtataaattgatgcaggaaggaaaggcagaagaaaatatgcaggaatgaaaacaaatatttgaatgcagtgaagtagttctaagccaaaatatgtygaggtatagtgatttttaaaaagatcttcaacttgcagaatactttacaacattccctgccaaaaattccaggtatgcatcagggtcttttatcatttta

SEQ ID NO: 36725 - DNA, 201 bp, Bos taurus
atggagagaggactcatatctgcctcaataaaatgagacctaaatttggctcactaggaatcttatttctaaacaataattaaaagaatggggtgattttyttatttttgttggaaggctgatttattgatactagcattttctcattcagcatccaattgattttaagactctgtgtcacttaaacttttatgggtattt

SEQ ID NO: 36726 - DNA, 201 bp, Bos taurus
gacgaggtgcagaaagcacacaatctaaagttaccctcttgacttagctctttctcttttctttcaacagatagatgcagacaaacctttgataactgtgytccctgaattcattcccctaacatcattcctaaaggcaacctctagtctaagctgctatatatcactctcatgcatgttttataacttctttattattgt

SEQ ID NO: 36727 - DNA, 201 bp, Bos taurus
tttgtctctatgaaaaatattttgttttcacattggaaaaaaaagacccatatattcattccaacagctttacggaggcttggccacccagtgagtgacargttacacacatcagtcacttgtcaggtcattgcatgactctttcacagatccagatcacatcagggccaaacatctttccttaagattagatgtaaaagg

SEQ ID NO: 36728 - DNA, 201 bp, Bos taurus
tttgcttttatttcttttgccttagaagagtgatctaggaaaacattactatgatatatgccagagaatgttttgcctatgttctcttccaggagtttcayggtatcatatcttacattaaagtctctaaaccattttgagtctatttttgtatatagtgtgagagaatgttctaatttcattgatttacatgaggttgtc

SEQ ID NO: 36729 - DNA, 201 bp, Bos taurus
agacattcagttcactatcagatataagcatccatttcaggtacaactggttttatgggctgttacctttggtgttaatattcatacatcgggaaagcacmtttatttcaagagaacagataatcatggacatttctccaagtattgaatgtccctgaacttgggaagtttctattattctggaaaatgacttaggaacac

SEQ ID NO: 36730 - DNA, 201 bp, Bos taurus
aagagtactagagtggggtgccattgccttctccaagtctcttacacagtttatgtcaaattggtattataatattcttcggtagaatttccttttgtttratgttattatcttggcttgtgatttcctttgtggaatttgagaaataacatttaaatctctttaatttaaaattcataattgccaatattaatttttgta

SEQ ID NO: 36731 - DNA, 201 bp, Bos taurus
gtactaaacctgcttttagctttaattttttattcaaaagttaaatgggaaacatgaaatagtttggatcaaatatcacaacaaatgaaaaacgtgcagcrgatgattcttttaaatgcattattcttatgtcctgggccagacgactttgtcagacaatcctgtttatgtctgttggaaaagagaatatttcttatatat

SEQ ID NO: 36732 - DNA, 201 bp, Bos taurus
accatattctcatataccattttccctattgctaatgttttgttacatgatatagtcaatcacaagtgataaaccaacattcatccactgcaactgaactycatactttattcaggttttattataattttttctagagtccttttttctgatctaggatattatccaagataccacataccatttagtcatcatggctca

SEQ ID NO: 36733 - DNA, 201 bp, Bos taurus
aatttgtgccaatgagagcagcaaacgaaaatgtcagagaaatgtatgcttccgcactacttactgttcctctgaagcattttcaattttactcctaaaaytgactcattaatgctgttctcaggactaattattcattcaaccactggttcacaaatagtcaatgaataattactacatagtaggaactatgcttagtga

SEQ ID NO: 36734 - DNA, 201 bp, Bos taurus
ggttggacaatattatcacctaacattgctatcatctttatatgtagtcaccaagtccaatctacagatgaattagctgttcttaaattaaggactattaycagtcagtaatgatatgacattcttttttatgactatagcttgggttataatgtgacaagaaaaaaaatgtaatgtttccaaaatgacagttttttagat

SEQ ID NO: 36735 - DNA, 201 bp, Bos taurus
gaccaagaaacatgtacaatttatggatgctcaccaaactaattggtgatgtatacctgaccatacaggcttgtccttccatctctgatagaggaagtgtytatgattggcctagggcatcctctgtctgcaagttatcttactagaacctcagctctggtcttttcaaccacactatcagcaaggcaagtctgatgtggc

SEQ ID NO: 36736 - DNA, 201 bp, Bos taurus
ttggagtgtgtccaaataatggggctgaggacagggttgttcactcttctgtaaatattatttcacatcatcttcctaattttaattatgtcctctctctyttctcagctgagcatactccccagtccaaaacctcattgattttttccatttagtactttttcttaatttttgatgtttgaggaatgggtttttgtattg

SEQ ID NO: 36737 - DNA, 201 bp, Bos taurus
taccaaaccacatcagtatgaactatctctctattctctgtaaaatttgttcatatctcaacaatagcctgttctcatgtgtatcattgtaatttatttayatattatctataaagacaactgtatgcattagtcttatatacatttttattcacagggcaatataaggaactgaacagataattaacaattaatgaaaat

SEQ ID NO: 36738 - DNA, 201 bp, Bos taurus
ggtatctggaaataatattagaatggaaaagatatgaaatagtccttgggagaatgaaataataaaattattattaggtagcactaaggagtcatctgacrtttaaagtcataaatttaaaataagactgatcagggactcccctggctgtccagtggttaagacttcacctttcaatacagagggtgcagtttcgatccc

SEQ ID NO: 36739 - DNA, 201 bp, Bos taurus
atctccttgaacttgactgctttagcaccaacatctgcaacattaaagcatctaaacaatatttggtaacatttgatgcttttttatttgtgctcacagartgcctaatgtccaggtaactcttaggtgacttgaatcattgttattctttataaatgacttcatagtggatgactcattctccatttcttctttaaaaac

SEQ ID NO: 36740 - DNA, 201 bp, Bos taurus
ctgcactcttgcccattttgagtgttattaaaaacattgaggataatcaagtggaaataaaattttccctaaagattgatgtcacatttgcttgtttatgytttctcttgtgtaaattgttagtttacaaacttcagtgttcacaagcaagatactatttcctctggggagaaagtatatcagacctgtgagtatgaagca

SEQ ID NO: 36741 - DNA, 201 bp, Bos taurus
gaaatatgaaagaaaagacactttcattttatttcctgtacacttattatttcagctgctattctttcatttctaatattttaagtagattttggtagcaktatctttctgtctgaaataattatttaagcaattacttgagagtatgtctactgaccaaaaaattctctaagattttctacacttgagaatgattttatg

SEQ ID NO: 36742 - DNA, 201 bp, Bos taurus
atgcagaaaatggtataataaatgcatctgccccatatggttaatgtgaacattaatggaatgtgagagagtgcatgttaagcattagcacagggcctggytcttgttagtcgtacctgctcttattgtcagttattcactttatattcccggtttcaacccagtgcctaatatataatagttgttcaacacatatttact

SEQ ID NO: 36743 - DNA, 201 bp, Bos taurus
actctccattcatgtctgccgcctccctaccgccagcctttgctggagccccggggtgtgtctccagccttgaactgctgatactttccttggccactttscttggtttccctaggtaaccgtttttccatttctgcagcatcttttatgggaagggtgccgagagcatctcccgaggaagtgtcactggccagttttaga

SEQ ID NO: 36744 - DNA, 201 bp, Bos taurus
tagcttccaggtgacagcctaaagtgcctagaactcagtttaatgattatgtgactttttaaattctcttttctttgttatgtatgatcttatcacttatragtgagcacataacaagtttattcagttttaaacaagataactaaaggagagtgcttctgaaagcagcaataagaaaaggtatgtgtgatttttattatt

SEQ ID NO: 36745 - DNA, 201 bp, Bos taurus
ctataggaccttgttgttcatctaaaaataaactttccttttaaaaacaatttcaggttttcaagaaaactagaaaaaaaggacaaagttcacatatatcyctccctcttgatctagtttcctaatgatgtcttgcattagtggcagctttgttacagcccatgaatcaatattgttacattattattgacttaatttcat

SEQ ID NO: 36746 - DNA, 201 bp, Bos taurus
gggtagcagactaaggaggaattaacaaagtttgtttacaccactttcttagccttgaattccatggctgtactgatgagattgctttcgatactcctggmttagggagcataccttcatgtgggagatttatttcctcctttcaaggggaaaaagttgggtcagagtgtggttgccttaataatttcccctaactgtctg

SEQ ID NO: 36747 - DNA, 201 bp, Bos taurus
tcatcactatgtgccatgtaagaaggaagaatagcaaagtagatgagattattctactcaaaatcacaccatgtgtccagcagcacctgggtccaaatgcyttcagtgtgggttgatggaagaaatgcgagacagatcttcatgggcagactcttggcttaaaagtttttctaataaagcccattattttacccataccaa

SEQ ID NO: 36748 - DNA, 201 bp, Bos taurus
ccacagattcatttgttaccccacccagtgaccagtaacctgactctaacaatacaacttaactttatatttggagagaggattataattaagttcttackattataccagatttgtcatatattgatgtttttccttattaaagtactttaaaatatttcaaagtttatcttcattttttcatttttttaaaatttgaaa

SEQ ID NO: 36749 - DNA, 201 bp, Bos taurus
gtaaaatccgtgacttgcctgcaaaacttgagccaaactaagtccatctaaggagcccaaaaaggggctgctcatttacacatggccatacacacacctaragatcatttggtatcttttctataatcattcatacatttatctatttatccttgtagttggagaaatggaagcaacgataaataaaatatggcctttgtt

SEQ ID NO: 36750 - DNA, 201 bp, Bos taurus
tatattaagtccttcttatgatcaaagtaaattcatgtcccaaaaagttcaattataaaattatcaataagacttactaatttcaataagtcactttgctkctgggtaaattattctaattactaacatgtataagtcccattcggacataaaaagaaatcataggtacaaaaaaggagataataattaactaagcattct

SEQ ID NO: 36751 - DNA, 201 bp, Bos taurus
gtgttcagtaatttgatgagataaggatgaaactaagtctcagaattataagaagaaaaatgccacagcatttcactatagccacactctgcaggacttcraaagtcaaaaaaccaagaacaagttagagaggattaatctttataacaatatcttatactagttaacacttcagtttcacaaaacatcatttaattcggt

SEQ ID NO: 36752 - DNA, 201 bp, Bos taurus
ccctctctcccttccctgccccctcctctttcacacacacacacacacacacttctagcagaagttccaagagacaatgatgcctgaacctgcagcattcyaacacatgtaggtcttctagacatagatccagactagttcaagtaaaatctgctgctttgagggtagttaaaaccaaaggtctcagacactgaattttaa

SEQ ID NO: 36753 - DNA, 201 bp, Bos taurus
gtatctatgagttctcacagtaatttttatttcagtttggaaaacattacttgaagggcttccactggggcagagcctatgattaagccctgggaatatgmaaacaaatcactgtgagaagctcatagtcacatagcttgttttagtccagaagtgctcagtcctcaaaatatattgagggaaagcataatcccatcagtt

SEQ ID NO: 36754 - DNA, 201 bp, Bos taurus
gtgaggaaaccatcctggaagaagccatgaaccgtcagttaatccacaggggctttagccactatagacatccttactttgatgtcctcggtgaggccctytctctggcaatttgctgatgagtgcaggtgactgagaacaaacaggtgttgcgaatggtgtgcaggagggccagactccaaccacagcctcaaaaagaca

SEQ ID NO: 36755 - DNA, 201 bp, Bos taurus
ggcccttctcattgttgctgtctacttcctgggccttgttactgttttcagtagcagctgagaagacttgcagcttcagatgacacacagccaagctgagrtgggaggccggatgaagggcctgcaccttcctgtgcgtcctcatcagagaagctccacttttattccagccaggacacaatcttctttttttaaaaaaaa

SEQ ID NO: 36756 - DNA, 201 bp, Bos taurus
aaatcatgtaacaaagcactgcagaagtggaggtggggctgagggagaggggcaccaggaactgaggggagcctacataggaataggcagcaagaagctgratcctcaggcctgcagatgaaagggaatgaattctgctaacaaccagagtgaactgagaagtgaattcttccccagtcaagcctcccaatgagaacacag

SEQ ID NO: 36757 - DNA, 201 bp, Bos taurus
agttagttgtggaagttccagtaggggatttcaggtagagagggaaacctgggaaactttgggagaccgctggaagttcatgattactcaagagaagtctyataactttgtggaatgaagcaggtttgcttaactataaagccataaataaaagtactagatatgccccagatcattaggtgaaagaaaaatatcaccacc

SEQ ID NO: 36758 - DNA, 201 bp, Bos taurus
ttgaatcagacatcagccaacttggggctgtgacataccagacaaatattgacagttgctaaggcaactgggataacttattgcccaaaggataatatagrcgccaattgtgcatgccatgtttctcacataggggagagacagacatgaatgaaaaaatgtatttcatgatctctcttcaactgtggcttaaaaacaaca

SEQ ID NO: 36759 - DNA, 201 bp, Bos taurus
agccaggcagaggcactgcttgggcagatcgagactcgagctctgcgcaccctgcatgttcaggctttcccctgtcgctctcataggccttttccaggtckgagattggctccgctcgccccgctccaggtcgggctcgccccgggccagcgccacagcgcaggttttatagcgcgctcctgggacgcgcacaagccggtt

SEQ ID NO: 36760 - DNA, 201 bp, Bos taurus
catacggagctgcctgggctggaacacaggcctgccatttactcagttgggaatggaacctccctgtgtgcttctgttaaatggagataaaaaacaggacyggcctcatggattcttgggaggactggcaaaggtaaataaaatacatgcaccgagaaaagtgcctggcatgttgtaaatgctcaaaaaactattgttgtg

SEQ ID NO: 36761 - DNA, 201 bp, Bos taurus
aaagaagaaaggtaatggtgtcagtcaggggagttgttttaacatctctttgaattaaatcaaaagaaaacaaggcagccaccacaaaaccagagaaaatrccttcaaccaaattagtcaacaaaatatcctcatgaatttcagaatataagtggggcctaactagcaaaacccaaaatacctcatgtgatatcttttaaa

SEQ ID NO: 36762 - DNA, 201 bp, Bos taurus
gaggtgctgaccgctggattcaatgtgcagcggtgttcctccttgattttcaaagtcctgaactgccaacgctccttctcatgtgggagcgcacagaactkcaacagggacctctgccttcccaccttggtggaacaagggcccacatcacagagctcatgcccgctgccaggaacccactgagaatcatcaccatgcttc

SEQ ID NO: 36763 - DNA, 201 bp, Bos taurus
catcaatggtcaatgaatgtttattattatgattacaatatgtcttggtactacctatcaggccaaaaatgtaaataaatccaagccactatttcttaagytatttctgactcaaaattagataacaggtccttaggttgctaccattacatctggagaagccagatttgccatcaaaatatcttgagaaaaccataccaa

SEQ ID NO: 36764 - DNA, 201 bp, Bos taurus
taggactctgggccttcaagatggtctgtttcccccagttttatagacaaaaggtttctacaaccctggacttgcaccaggacccagcacctttgttgccyaaggccatcctaccacttcatccttaagctgttccgaaagcagtggctgccgccactagaatacatcccgtttgcctctaaaaggaaggctttttttggc

SEQ ID NO: 36765 - DNA, 201 bp, Bos taurus
gacttagcaattaaacagaaacaacaatccaatatccagtgggaaatcttaagaagaaatatgacttggggaacaatggggaacttggaaaaatcccctcyacttagtctctgtggcctcaactcattctcattaacacaggatgaaccagaagctctttcttctctgtctgttccttctctctaataacagtgactctgt

SEQ ID NO: 36766 - DNA, 201 bp, Bos taurus
agtcttttccaactggtgaaaatacactggatcacagctggaaggtaagccaaactttgggtgttcctctctgactatttccacccaagggaagaactacyacgaaactgctgtttctctggctgatactgaggccctgtaggaattaaaatagtctaaggaaagtaaacagctgatggcgcaagtctcaagattaagctc

SEQ ID NO: 36767 - DNA, 201 bp, Bos taurus
cagtcttcaggggtgatctcgctcatcctaacacgagccctctcccttctcctctcactctgttctttctaccttcctcctgtgccagctttgtaatcctrgggatgaaagaagggagaaaataaagctatcatccattcatccatgtctcaagttccacaatcgttagcaccaacactcgcctggactactagggggctg

SEQ ID NO: 36768 - DNA, 201 bp, Bos taurus
ggggccaagatctatagtcagaaagctgggaccccaggacagccaatggtgtagtcccagtccaaacattggcaggctgaaaacccaagaagagctagtgytacagttcaagtgcaaaggccgggaaacaagccagcgtcccagctcaagacaagtcaggcaggaggggttcacttttacttgagggggggatgaaccttt

SEQ ID NO: 36769 - DNA, 201 bp, Bos taurus
ccctagccttctgccttcacctgttccactcctgtgcgtacggccacagtagtctcttcactctagcacaggtcctaacgagctttagaaaaccaccgacyaggaatgtctcggagcctttgtgatgggtcaccaaggcttgcagaatagtttctctgaaaacaattttatcttccttctttggcattagaaaccaaaaga

SEQ ID NO: 36770 - DNA, 201 bp, Bos taurus
gggtcccctgctctgaacttggcacttgatgtgtgtaacttaaactggaagttctttgaagacaggaactgtttaatcctcatctttccacatctgggccygacttccttctcaggagtcccttcccaaagttttgcagagttgaaataaacttttctatatcactcagcatgctcttggggggacttatttgagctccag

SEQ ID NO: 36771 - DNA, 201 bp, Bos taurus
cccacaatcctgtttgacccttacttatcctttagcccccagtttaatcccttcctcctgactaggtcaagttcctctttcatgtcctcccttaggaccaytagtctctccttggaacgctcaccacagcagttgattttattatggttaattatttaatatcagtctcccaaaagagactgtcagttccataagataaag

SEQ ID NO: 36772 - DNA, 201 bp, Bos taurus
tcaatgttttccaggtagacaaagcagttgtgagtgaagagtgtttcaagaagagatagcaacatgtgaaatagcatagtggtgtgaatcagtattcattwaaaaaaaaataattcaatcacctttagtgagttcctactaattgccaggctctgcaccaatcatggaactgctgggattccattttgccctgcaggcagc

SEQ ID NO: 36773 - DNA, 201 bp, Bos taurus
tggcaatccactccagtattctggcctggagaatacaatggacagaggcggctgatgggctacagtccataaggtcacacagagtcggacacgactgaaaygactgagcacatgcgcactcagggccaccctcaaacaattaggttccagacatggccgaaaaatactccagttttctgtcactcactgggaaatatttga

SEQ ID NO: 36774 - DNA, 201 bp, Bos taurus
caacattagtttgattatccatgaagggaagatgttaccaagccatccaggcccttattccaaaagcaaccagcaagtgtaaacccggcctcttttccctkcaaaccacggaccatgcgacattcgggcagcacatgcttagctatggatgtactttctcctctctcagtccaggccttctagatacctttgcctacatct

SEQ ID NO: 36775 - DNA, 201 bp, Bos taurus
ctctttgcctttgcttggacctctcttgaaatggtggtctgtcctcccatctgtgctcccatctgatctgctttactaggttataaagtctttaaagccartggtgacccttaggcagagttggtatctaatgacttgaattgatgctgaagatcctggcctgtgttcagcagttgagtcacacaggcagtgggacagcag

SEQ ID NO: 36776 - DNA, 201 bp, Bos taurus
gggagaacttgtaaccatcccgtaacaggggatgaaaggagaaaaggagatttttctgttcctttcctagaaaataatctacacagatgagataaaagcayacacccttacaggctcccactgaaaattttattaaaaatggtggtttctttgttcctaatggttaccaaagaagaaccatccttcacttgtatgtcatga

SEQ ID NO: 36777 - DNA, 201 bp, Bos taurus
ccccagcctgtagagagagtttaattcattgaactggttctcatcacagggttttaaactttctctctgataattagtcctttagggggtacacttattcrtgttgattgtctttagccaatctgctttttccattactcaggtgaatactgttactggtagcttttctcttggtcattgtagagaactggctgtagcagg

SEQ ID NO: 36778 - DNA, 201 bp, Bos taurus
caatacttagcaagcaaagtaagttgcctctgctcagttagaacttcttttcaaatttcttgtccccctgaaccattttgtattttaaagtgctgtcgtgrtggagttcagggataaagaaagagatgagctatttttctttttagttatattgccctccatctgattgtttcaggttgctgtgtattcagaatatagaca

SEQ ID NO: 36779 - DNA, 201 bp, Bos taurus
cacagtcaatcttgacttcagtcagagttgatgaagtgttgtaggaaccacagtaatcattaagtataatgtgtcgaggccattgcctgctgaacagcctyggtgacagaggagtgaagatgcagtgaaggaacacaggctctgaggaaggactcaataaatggccaggccattctcccagtcaaattcttggctctcttg

SEQ ID NO: 36780 - DNA, 201 bp, Bos taurus
tgtatttctcgagggctgtgtgtcaaaaggagggtctccatgttagctttcatgagaatatgctacttgatagtggtgacagttggccagttagaggttayaagataaatactcttatttttctagcatgtactgtatagaaaactggcaacgaaaccaaggaaacatatatattgccatatatattgggctggccaaaaa

SEQ ID NO: 36781 - DNA, 201 bp, Bos taurus
gtcactgatgcttctatcatgcagtaaacccagaaaattactatttgttgaaatttctcactgcttcaatttatgcagaaatataatacagttttatgagyctggagtatttctggttacgagagaagatggctatgtttgatttcaaggccatttggtcacatttctaacctgttaatttttttttccaattttttcact

SEQ ID NO: 36782 - DNA, 201 bp, Bos taurus
ctgaacagaccccagctctgtgttctgttctcagtcatggctcagcacccaacccagaggcctgagctccttcagacaccttcagctgtgcactctttcayggaaccaatagtcatggaagatgatttttctgtctagttcaacacttagtttcctgctgaagaccaaggcgtggaagcagtaaggtcatttacttaaggg

SEQ ID NO: 36783 - DNA, 201 bp, Bos taurus
tgccttcaaagagcttaaaatctaaaaaaggggaaatctaggtcaacaggataacttggggcattgaggtaaatggtatggtagacgtcaaggagaggatytataggaacaaatgaaagaggcccctaattcaatgtggggaggatcagggaagaaaactggaggagcagcttccaacaggaaatgagaaagctaaggtgg

SEQ ID NO: 36784 - DNA, 201 bp, Bos taurus
tgttatattatatattttagtaaaatattagctttggaaccaaagctgcagcatgtactttgtaagctatcattaacagccatgtctatgaaggaaagctrcctcttttgaaataaggaaaactgaaatttaatattcatgctggggactgttccctttttacaatgtgaattcaggaagttgttgtaaaatttaaaatta

SEQ ID NO: 36785 - DNA, 201 bp, Bos taurus
ctgctttttcccctacaatcttatgtacaagtagtgaattatatttattcgcaactctccagaaaactcatggaattttttttctttagtctaataacatygttggtactttagtttcacttataaaatattgtattgctttaatgaaagtaagagcaactcgtgacatttcaccatgtgttagtgctgaaaatgttttgc

SEQ ID NO: 36786 - DNA, 201 bp, Bos taurus
tttctgtatgctgacgcatctaaagttaacatgataatatttatcatcaagaaatatatctgattgctagtgaaactaggaagatttaacttggaaaagargaataatttagaagtaaaggaagagtaattaaaatcaatcaattgtttgcttagcagaagaagagacaacagaaatagaagtgaaattaatgatacatta

SEQ ID NO: 36787 - DNA, 201 bp, Bos taurus
taaatgacatccaaagaatacaagtcctccccaggtcaggaaaccagagccctacaaccacaggcttttgtcaagggtctaccatgacttgcagtcttttyattcccatataaacctggctggtagttgtgtttaagaaagataatccaatcaaagtgtgttcagcaattccacataagcatatctatatgctaacctcag

SEQ ID NO: 36788 - DNA, 201 bp, Bos taurus
atatcagtgtttgtttctttcctattaacttggagatgattacaaatctgactgtgtattttgataattggtatacattcaacactcaaaatatctgtaartgaaaagagagaaataaagaaggaagggaggaggaaagataggttaggaatagaaatagctgtaatatatttatagcatgtaacccatttaagggaaaag

SEQ ID NO: 36789 - DNA, 201 bp, Bos taurus
gttaagagttgaaccaagacctaaaaaataaaggagttaaggatactaaaatttagcagaaatgtgtcctaagaggagatggtgcaaaagacctagggcasacaaatttctgaactgtttgagaaccagcaataaagctgacctaactagaagagagtgagtgaagattgaatatctgagagttaataaggagtggagcag

SEQ ID NO: 36790 - DNA, 201 bp, Bos taurus
aaagctgtatgagccaaaagtcaatggaatgacatctctgaagtcctgggaaggaagggggaggaaagtttactggcgaccattcaataatctgtcaaatrtcatttaaaaataaaaattaaatggagatttttcaaaaaattaatttttaattatcagcaaaatttatcacaaataatggtaataaccattctcaaggca

SEQ ID NO: 36791 - DNA, 201 bp, Bos taurus
ttacattagagtcagagagagtaggaggaaccaggtacacagaataaaaatgagattcaattaggtagaaagaaatccaagaaactgagtcacagatgctmagtgaagaaatcatttcagagaggaagcagtttgactgttttgaatgctgttgaggtgttgattgaagaaaaataaggaaaagaaatatctttgggcttt

SEQ ID NO: 36792 - DNA, 201 bp, Bos taurus
cccccttggcagatgaattcttacttctgcaccatgtgggaagccccttgcctgagtcaaatattaagtattaatatatagctggcccttactttccaggmtgctcaatggtaaagaatctgcgcgccaagcaggagaggcaggttcaatccttagtggagaagatactctagggaaggaaatggcaaccaactccaatat

SEQ ID NO: 36793 - DNA, 201 bp, Bos taurus
atatgagttggtcagctcatatgggtatgagcatacaaaactgtcctgatcatttgccctcagccagtcatttttactgactacctcataaatcataagaycagtctgatgccaaggtgatagaggtggagactctttctgggcccagcagctgagaagcacttaaaattgacctcccagcaatggacaccaattttgaac

SEQ ID NO: 36794 - DNA, 201 bp, Bos taurus
catcatctctaattcatgaaacaatcctgcaaaggaggcattatattgtccacttcataagtgaaataacaaaacattgtctgagttaggttcatacagtmagaaaacaccagattaataaagcttttagaaagcagtaggggagacttcttttaaccccaaatctgtaattcattcattataccatggttaatcaatatt

SEQ ID NO: 36795 - DNA, 201 bp, Bos taurus
aagttatagtttgctgctagaatgaagaaataaaagtatgtatgtaaatatgtatatggggcttcctaggtggcactagtgctaaagacaccacgtgtcartgcagaggatgtaagagacgtgggtttgatccctgggccaggaagaacacctggagaaggaacggcaacccattccagtattctctcctggagaatccca

SEQ ID NO: 36796 - DNA, 201 bp, Bos taurus
caagaaagacttagagattcataatataagaagaaaagataaattgaaagagaaaccttgaaacacataacagacaagcagtctagaaagagttcatatamatatataaattaaagacaagtgagacagaggcaaacagctcaataagaaaatggtaaagaataggaagagataataaagaggtgtaaatatctacgaaac

SEQ ID NO: 36797 - DNA, 201 bp, Bos taurus
atgtgacaatttaaccaagtgttatttgggctaaagaagttaggaaatatattcctgggtttcctaggaattatagagctgccagtggggtgatccatttycagtgtgaaccaaaggaagaaatgacagttttcacagacatgtgctatgctcttccaaggacaaagctcaaattcctgacagggctaagtaatccactta

SEQ ID NO: 36798 - DNA, 201 bp, Bos taurus
tggtggcctggttgaataattctagtcccttctcacttggaagtgaacagacaatagaagttaatttagtttctgaaagaggctttttagtcactggcagmaaccgggcaacagtaatttgcaaaccctgccctttattaaaattcattgttgctttcagagttagagaactgtaatttcagagatccaagcaagaccaaa

SEQ ID NO: 36799 - DNA, 201 bp, Bos taurus
tttgtttgtttagttttatttgcctatttttgtctgtgctgtgtcttgttgctacatgggctttgctctagttgtcaggagtgggggctactctctagttrcagtgtgagggcatctctgtggtgtcttctcttgttgctgagcacaggctctagggtgtgtgagattcagtagttgtggctctagggctctagagcacag

SEQ ID NO: 36800 - DNA, 201 bp, Bos taurus
gtggaagttccagcttatactacttcaaatgagtatgatctcatactcaaaatcagagcaagatcagttattttcagtatctaaataagtgtcacagtaaytaaatgtaaataaaatttgattttaagaaaaataaatttctgcaaattattaagcttttttcttcttaataccaataattttgattttattttgtgactt

SEQ ID NO: 36801 - DNA, 201 bp, Bos taurus
acaaagctggaagtatcacactccttgacttcaaattatattacaaaaccatagtaatccaaacagcaaggtactggatgcactgaatgactggcctggcrctgcagattgagaggagagcctgaaggtgcaggggaaattatgaagccacttctgttagtgaacctcaaaaaatctgaggcagaatggccaaaatgacag

SEQ ID NO: 36802 - DNA, 201 bp, Bos taurus
tgatggcaaataatttcccatgtttaagggaaaagaaacagtgagactaaagtatggtgaaggtaaagttgctttgtatgagatgagtgagaagggtggaygaagaccagaatttctaggccttctgaggactgagtaaggagtcaaaatttaattcaaggttaatgaaaagtaaagcttggtagtgacatgtcagttgga

SEQ ID NO: 36803 - DNA, 201 bp, Bos taurus
ctccaaggggtcttcccaacccatggatcaaacccaggtctcctgcattgcaggtggattatttaccagctgagtcacaaggggagccctcctaaatggawagtggtatctcattttagtttgcctattcttaaggatattgcaaaagtaggaagtcaagaaacacctgggtaacaggcaaatttggccttagaatatgga

SEQ ID NO: 36804 - DNA, 201 bp, Bos taurus
ttaccctttatagatttctcctttgccaactcgtctcatattatttgcaccaaaactgaactagcggtcagtttctttattttttcatcatttttcacctyttagtatgcttttctctcaacctcaactgctccctctcatcggcttcctacatctattaaatgcagtttttccatatattttttttatataataattcag

SEQ ID NO: 36805 - DNA, 201 bp, Bos taurus
aatgactagtcaaacatagattatttatatttttcctacaatttaaggactactttctatttcagtttattcatcccttctgtaagttgaattcatagtayacacatattcaccaaattatactattaaatactgagctatacatatttaggatattggcatttgtaatgtttaaaatgcaaaatatttattttcccaact

SEQ ID NO: 36806 - DNA, 201 bp, Bos taurus
ctcagtcactgaatggtgtccagctctttgcaaccctgtagactgtagtcgcaaggttcatctgtccatgggatttcccaggcacaaatatggaaatgggytgccatttctttctccagttttcttcctttagtcatcataaatacacctatttaactcagtgtaatcatctctaaaacttctctgaaaatgggtagcaac

SEQ ID NO: 36807 - DNA, 201 bp, Bos taurus
ggctgctgttgttacactttctgcctaagaagccatcattcattgggaccagaaacctccagagaaaaggccactgataatcttgagaaactgagtaatcrctacagaagaaaatattttggctccagagcaaaatgtccagatataaaatggagtcaaatgtagttatcaagagggagggatacccaactcagagtgaag

SEQ ID NO: 36808 - DNA, 201 bp, Bos taurus
aggcctggaatgtgagactgtagcaaagggccagtagctgaagataggcaaattacaaggtccaggggaagtaatggtgggtaatagctagaaaggcaagrgtaacattataaatggccttatgtgacattctgtggatttgatttgctgatggtgagtatttgttaggcagaaagtacaggattagatttacatttggaa

SEQ ID NO: 36809 - DNA, 201 bp, Bos taurus
tataaaataattattcaaaaattctttatgtatgtatgaacaatgtttaacttgtgccaatgaacattttagtaatatacaaataatatgctattattgarttaattatggaatgactttagatatgctatcgccaggttatcctttaatatctagttcttttttgtgtgctataggaagtttttgtgctataggaagaca

SEQ ID NO: 36810 - DNA, 201 bp, Bos taurus
tctgtttggttcatggtttccagctttattttatataccttaactgaggtggaaacataacacagatgtcttttatactgtctaagaggtatgaaatgttkgcaaattttgtaatcaatttactatgattctacttaaacatattgtatcttttctgtagctctttgtggagggaatataactgcaatgaatggaaccatt

SEQ ID NO: 36811 - DNA, 201 bp, Bos taurus
tagtcagttcaacttatttaaattacttttgctgtgaggtttggaagtggagatagaaagcaagagaaaccactttaaataaaggttccaatgtggattgyaagtagcttctgttctaaccactagaatcattaaactttattgaacacatatgaagaatgaagatctaagggaataaacaaaagaaaagttgtaaatagt

SEQ ID NO: 36812 - DNA, 201 bp, Bos taurus
aacattttcaagactcccgagctcttgatatatggtggtgaataacatagaacccttggctgagagaagctgttttggtgtgtgggtcaaatggaagagartattttataggataggttgataacactgataaaaatgaaaggaactatggaagcacataagagacagttttcctgatctgtttactgcaaggagagcttt

SEQ ID NO: 36813 - DNA, 201 bp, Bos taurus
aaatagaggataagtacactgcacacttgaaggattttaaaataattattaagtgataattattaatagaacatgaatttattaaatttatttaatcttgkttaacttcaagggattatgtaggcacagaaaactccaaggtagttttcattaaaataatactcttccttcctctatagacagttacaaaaatttgtcctt

SEQ ID NO: 36814 - DNA, 201 bp, Bos taurus
ggccagagaggccttctgattgccagctacaagagggtcaaaaaaaaaaaaaactctgatagagccataattcctgtagcagagacagtccatgtccctgkacagttggccctgccagggtccccataacccaataatagtaggagacattaacaccccactcacaccaatggacaggtcatcaaaacagaaaattaataa

SEQ ID NO: 36815 - DNA, 201 bp, Bos taurus
aagatgtctggaactcaaacaggaatctgcagccttaccatcctgaggacctggagggcaaagttaacacaatcccctggattgtgaaatgtaggtaatamatacacttaaaggagggaattgtagcgagatgctccaaaatctgtgcaaactcgctttagatcatgccaaattatacagaagtgtgggagatcccagcgg

SEQ ID NO: 36816 - DNA, 201 bp, Bos taurus
taacaagagcatcaacagcaatagcagtgacaactttgctaaatctatgtcaagcatagtacaagtgggagaatcacctataactttattacagttcttaygctgaatcccttaggtgtgcaacaagcaagaaggttaatgaaacaaaaaagtcttcctttgtttattacccaaaatacgtgattatgtgattatggctat

SEQ ID NO: 36817 - DNA, 201 bp, Bos taurus
ggttccatctttttgagcttttacaatgagtataaagtgccttatttacaaacatttcaaatttgtattcttaatctagaagctcagtaactagaaaagtmgttacatttggaatttgttgtttgataccacattacattttgtacttcctagatatagcaacattagttatttttgcttacatattgatataatagtttt

SEQ ID NO: 36818 - DNA, 201 bp, Bos taurus
ttttaaattcgaaattaatgttttatagaaatagttatgcttggactctactaagaaactttctttaagatttttcttgtttcctgaggcagaactaccaytatgacccagtgattgcaatcctgggtacaaaaacaaaaggctctaacatgaaaatatacatattcccaaatattaatagcaaaacataaataaaaaacc

SEQ ID NO: 36819 - DNA, 201 bp, Bos taurus
tgatatattaaaagaaagctttaattaactacatgaatggtttatttgattttattttacatttgtggaaaaaaaacactagaaaactagaatttaaatcytcatataaaatctactaatgtctctgttgctttgtaaggattgcttcaagggaaatgttgaatttagttaacaagtctgtactacttatgtaaattagag

SEQ ID NO: 36820 - DNA, 201 bp, Bos taurus
tttggtacaaattctaaaacaatctgtaaaagagcttttgaaatcctaaaattgagatctattacctgatttttcccaccccacaccaaatggtagctttmtttgtattcagacgattcattcaacacagttattgatttacaagtgctttggaaacattccctaattgatctttcctaattaatgtacgatatagctatg

SEQ ID NO: 36821 - DNA, 201 bp, Bos taurus
tatctgtttcaggagcgactaatgatgagaagctcagtcatagattagctcccagattactggttttttttcccagggtgaaaatgacatggccattgctyagtaagcaagaggattaacagcaataacattcaactcaaatttctcatttggagtatgagtataatgcttcctcgatgctccagtaaaatttttattttt

SEQ ID NO: 36822 - DNA, 201 bp, Bos taurus
atagcttttcatactgagagtcgatatgactttttaaaataattcttatgttatctacactgaaaaatgtatttatcttccttgtattgtgaatagagaayttagaaagcagactgagtctacttaaaactaattatccagatataaagtgaaagatcccttcatttattctggcatttatagacatctgatattttaaat

SEQ ID NO: 36823 - DNA, 201 bp, Bos taurus
actttcttccattagagaaaagctaaagaagagatgtagagacttacttggccagctgttgcttagcaaagaaaaaacattattctacattgatgtcacakaaaagcaactaccagaactcacggctcttactaaagctaaaattatatttcctgctatcaatcatagggaaatatggtggatctgacactaaaaatatca

SEQ ID NO: 36824 - DNA, 201 bp, Bos taurus
tagctggtaaaatgttatttctgggggtgtcttaagggtgtttcaggaaaagactaacatttgattcagtagactgagtaaagctatctcctctccaacakagagaggcatcatctaatagagtaagggccagattagaacaaaaatttcatggaagagtaaatttccactctcttcttgaactgaatgttcacctttttc

SEQ ID NO: 36825 - DNA, 201 bp, Bos taurus
agtcatacatagatattgcccccatgtttctaaaagccagcattcaataaacttcatctccataacctggatgagttgaaatattgtatcatttttactgrccatgttctaatgtcctgttgggaatagtttttatgtacttcataacaaaacttacagatccctggcattcaagaaaagagatccttaatcatttcaagg

SEQ ID NO: 36826 - DNA, 201 bp, Bos taurus
aatctagtaatgttatgtgtgaatcttttaattcccatataaagatgttgacactttattgtgcatataattttaatggaagctttcattaaagatttcayaaagtatctcccacaaatattccaaggatcttctctccatttttttcacttcatttttctgtatgttcttaatcttgctagaaatctacaactaaatatt

SEQ ID NO: 36827 - DNA, 201 bp, Bos taurus
cacaaagatcaacagtgttcactgttgagccaaccatctctgagaaaataatgatatatctaaaatttgtttttggtagcctttcaatttattcttttcaktgttcaaatctccctccatttggacaccctctgctcaggtgctaaagtccaggctttttgtccaccttagctgaagtattcctggcaagccctctccttc

SEQ ID NO: 36828 - DNA, 201 bp, Bos taurus
gggccatttactcctttcttgtcaccatatgcacctttgtggctgaccaccttccccctgttgcttctcattaggctaactttagagcagtgtctagtgtratagagatttcctttatattgtgattggaagagaacttttaagaatacaatgtatttccagttcttctgaagactcacaataattgcattttatctaaca

SEQ ID NO: 36829 - DNA, 201 bp, Bos taurus
tattcaggtcccaccaatgtaattacactgtgtagagaaaatatgctctggaatatatacagtgatgcagggctcttttttcaagtcaaccaaattaatgygtactgactaaaaatccatttttatattcttttgaaccagtgaaaaaagtataaacagatcatataattaaaagtagaatgcagtgatttttgaactcaa

SEQ ID NO: 36830 - DNA, 201 bp, Bos taurus
ctggaaatctcatgaacagaagagcttggtgggggctacagtccatggggttgcaaagactcaaacacgactgagtgactaagcgtgtacacagggtttgkggagatgccatgaatacagataatatccctggtggtgatggcttgtgggatacccagggaagccaataactggtcagaaaaggtcattagggaccaagcc

SEQ ID NO: 36831 - DNA, 201 bp, Bos taurus
tgggattctccaggaaagaatgctggagtgggctgccatttcctcctccaggggatcttcccaatccagggatagaacccatgtctcctgcactgcaggcrgattcttcaccgctaaggcccaagggaagccttgtttcaataatcatcataagaataatcatatcttaatgaaggttaaaaaccctgtgtgtaggcacag

SEQ ID NO: 36832 - DNA, 201 bp, Bos taurus
ccaatttacaagaaaagatttttcccaaagggataggctgacctttccaagttgagctgttcagaaaggagaaaaaaaaaatgcaatacactcagatgccrggcgtttctggcatttgtggcagaagaaaaaggaagtctgtgatttgtgtttgtcttaggccctgccttagtcgtggttgggtctgatacattttttctc

SEQ ID NO: 36833 - DNA, 201 bp, Bos taurus
atctgtgtagttggcccaacagctgctaaacggaattgttgtattcccactaagtccactgatttggttattattggagtcctttagtacggccttcaaarccagtgcagtaatcccaactgatacacaattaccctaaagaaaaaaagagtagagaattacaacaattggcctgttaccatgcttttttttttcctaaaa

SEQ ID NO: 36834 - DNA, 201 bp, Bos taurus
ggtgccattgccttctctgtctcatgatctacaacttccaatttgttcttcctcactctacctactttcctctttccttctcctcttcctcctcatttccrtgtctgtctgtctgtctctctccaacccttacctcccagtgtcagccacagtctcagcaaagtttcctcccttcactcaggtactcatctgctgaacacc

SEQ ID NO: 36835 - DNA, 201 bp, Bos taurus
acttcaaaaattaagacttataagaatacttttagaattacaatgcttacaaggcaaatagtgtaatatagcttctatacataataaaaaaagctgacctmtatgtgttttaactctatattctagtgtataggtgaatatttcctcaagtataagcacatgtaggtccttgacttcctttacttttcctttccttggagc

SEQ ID NO: 36836 - DNA, 201 bp, Bos taurus
aggggcgctgcgtgtgccagcagagcctcgagttggccctctgtgggggagatccgagagcagcggtgacagttggtgtcacagggtggcacacctctgtktgtaacacgatgtggcctttctgctgtgactcctccagttctccaggataatcactgagcatcaccaaatcccaagtgtgagtcacctcttgtggagaat

SEQ ID NO: 36837 - DNA, 201 bp, Bos taurus
ctaaatatctttttactatggtttcttagtaattctgatgatgcccaatgcaaatatgtttctgttcccaatgacattttaatactttcttcaaggaattkttgaaatatttaacaatagtaaattaactaaacatatttttcctttcctttcttttaagaaaaatagctgtctttttgttaaatttttactactattagt

SEQ ID NO: 36838 - DNA, 201 bp, Bos taurus
gtacctgcctgatgaactcaaatttagtcatctgaatgccaatcctactggctgtacttaggagcatatttaaatgggtgaatgcaaaactcttactgaargcacttatttattaaagcataggtgcgaatctaaatatggggtaggatggcaatggttcagatttgcggggggacagggaggcatggctcagctgctgac

SEQ ID NO: 36839 - DNA, 201 bp, Bos taurus
atacatttgggaagatgccccaaaactggctctgaaggctcctctcagggtaagccagctctgagctgcctgcttcttctcgggtccaagccctaggcccraggagttctgcatcctgaccttgggcagaagggtcatcgatcagtgcggcgcagagtgacagcgacagctaggcagacgggtctggctctcgaagcatgg

SEQ ID NO: 36840 - DNA, 201 bp, Bos taurus
ttctaccacagaaggtaataattcatccaaagtaatcttgactttgatgagactcttcaagatataatagggtttcaatagaaaactgccaaaaagaaacygtgaagttgctgatgtctacatggttatcccgtttctctgtttttttttttttttttacctgctccgtgtgggaatataattatgtttattcctactatt

SEQ ID NO: 36841 - DNA, 201 bp, Bos taurus
tcacaagagactagctgtcactataagtcaatatatgagacttagacttcccaatctcattcctcaacttttctggtcttgtaactgaataagatgagagrcaaggtgggcagtggggcatagaatgtattggtcatcataagtgctggaactgttacattactggtctcttgatgtgacagatttagttcttggagatca

SEQ ID NO: 36842 - DNA, 201 bp, Bos taurus
atggctgcccagtgttttccagtcatgtttagcatcaaatcctgcctagggatacattatgctcaggtactgtgcagtcttagatggggaataatgtggcyattacattcatttttttttttctgcaattgcccaaagacagtttttattagctaatcatattactgatgaactaacctcttcattagccttcttggaact

SEQ ID NO: 36843 - DNA, 201 bp, Bos taurus
gtttgctcagttcctaaagctagattttagctttggctgtgactagtatgccagttctccccttatcttgcagtgtcagctgtacacccacccctttcctkgcactcttgcttaggataactctttcctttctgaactttcacaaccagtctaatacttactgtgtacctctcaaactggcctacttcctccctaagtagg

SEQ ID NO: 36844 - DNA, 201 bp, Bos taurus
tacatccctcactttcccacaaagactaacaatggacctggagcacatagaaattttatcaaaagaggagagttcagacatcagctagtatggatgggacycactgtattggaaaaatacagtgtattggaaaaatactgaatggggaaaggaaaagtcaattcgcaaaaaaaaagagagagagagagagacttttgaaat

SEQ ID NO: 36845 - DNA, 201 bp, Bos taurus
gcccagtaagtgttgtgactggctgatgaaataatgaatgacctaatagtaactgtgaatattttcaaaggcacagccagaagaaagaagttggggaatayaatttcaacatgaggtgcagaactattgcacagcaggttccaagttcagcctgaacagcacaacaggcggactatgaaccaattctgggcgagtttctgg

SEQ ID NO: 36846 - DNA, 201 bp, Bos taurus
taggatttcatcagggctcaatcctagcccacttctaggggccaaccatatatagaggagagcaataagcaagcccactttagatgagttttctggcatamtttggttttcttcagggtgtggttcatctctcagcctttcccatagattggggtctgcatgatgaatgaagtttccattttatacctaaagctttactta

SEQ ID NO: 36847 - DNA, 201 bp, Bos taurus
ggacagaggagcctggtgggctaccgtccattgggtcacacagagtcggacatgactgaagcaatacagcacgcttgcatgcatgcagtgatgaagaaagmaagaaaaaactgagcatggtgattcgtctcctatcaccctttgcagtttatgaaagacttcggtatatattactaattctcacaccaagtccatgacaaa

SEQ ID NO: 36848 - DNA, 201 bp, Bos taurus
caatgtaagaacaaataaattcaattaagaaaggagatgccatgctcctcctttgtaaagattcctgatcagatctgcagctgttacaaaatgacagcttygagatgtgcagttacagctgtgcttcttcctaaatgctgctagtatcaggttggcttgcaggaggcattcttagaagggcaacattaggacaccacctcc

SEQ ID NO: 36849 - DNA, 201 bp, Bos taurus
gagatgtgactggcccaaggtcacatggctggtaagttaagggcaccagagtagtgttctaattctatacccagcagataagcagtagggctgaatcaacrtgcttatccctggccctttgtcttaaacatgctactatcattctgggaactaagtacttagttaatataatttgatttaacatttagaacagcattactc

SEQ ID NO: 36850 - DNA, 201 bp, Bos taurus
tggcctccagtaagtcactcttaccccaggggtgtttctacactgtacttaaaacaatcacaacacttatagattatattgtaattaactgattgtttgtytacaagctttttaagagaggagcctgtattctgtctacctggcaaagtacttgagagtttctcagaatctgttgagtgagtgaaagcccaggcaagactg

SEQ ID NO: 36851 - DNA, 201 bp, Bos taurus
aggatgcctccattttctcattcctggccaggctttcatgtgaatcatccaaagctcaggtgatggagctctgtgttcctgaacttgctccagtatataartcaggccacatttagtcaaatagatgataagcataagtcataatgtatcagtaatgccttaaatttttatgaaataagctgaaatcacttccactctctg

SEQ ID NO: 36852 - DNA, 201 bp, Bos taurus
cacgtgctgatccatcaggagtgccaaacaatctattgcaattttcagctgaagctccctttcaaactgtgaacaaggctaaaatagcatgcagccattcrtatgagtaaaattccattttcatacaatcatcgccactaagactgagaactagtaggtaactattttgtgtcacatattgtatactgataatctcacaaa

SEQ ID NO: 36853 - DNA, 201 bp, Bos taurus
aggaaatgaggttgaatttaaaaatttttttcattcattcgtccattcattcagctaatattctttgagtgtttgctatgtgccaggtactcttgcagcarctagaggtatagaagtgaacaagaccaggttctgttcactaagcttagattctagtgagaaatcaatttaataaaaaagtatatatactaagaaatcaat

SEQ ID NO: 36854 - DNA, 201 bp, Bos taurus
actaattctaggaaatggccagccacagactgaacagcctcttcctctctggaaaactcccaaaactgttattctgttcagttgcaatcaaacagggacarccaaatatacctaaaggccaatcacaaacttctccacactccttctgaaagtcttaacctaatagactgtccccttttaactttatttagttcactctcc

SEQ ID NO: 36855 - DNA, 201 bp, Bos taurus
gagcttacattcaagcaaagccacaggattggttcatgacagcgagccctgctccaccccatctctctgaccactagtcttggaggttcccagagccccaracactccctaaagctctgtagggataacacagtgcaaggccttcaaaatctctgcaactactttcagagatagtacctgctaattcctccatcatttttc

SEQ ID NO: 36856 - DNA, 201 bp, Bos taurus
taaatgcaaccctgattcccaccttttgaagctcacaccttattattaatatatgtgtttgcatgtgtgtatgtaaaaccatactgtatataaacatatawgtgtgtgccccttctctattcactccattctctattcactgtgatatttcttttattgtaaatgtttgtgtatagatatataatgtatttatgtatattt

SEQ ID NO: 36857 - DNA, 201 bp, Bos taurus
aaatggtggctggaggcagaggcatctccagggcctcttcattcacatgtctggtggttgttgctgacttattgtttgggatcttgataaacactgtcaaytaggcctatctacatgatccaggcttcctcagagtatggtgctggattcctaagcgagtgtctcaagagagaaaatcaggccttttcctagaaacctggc

SEQ ID NO: 36858 - DNA, 201 bp, Bos taurus
aataagctattttgtgtttcttctagcctgaaggtgggtgtagttctgcactgggtttggtgtaatggtccaggagagagaagaaagagagaggcatcgtyagtgtgattaagagtgtccagctttgtcctccactgtaatcagaattgaggcagtgttgtctgatcaaaatggataaacaaacaggttcttttagctctg

SEQ ID NO: 36859 - DNA, 201 bp, Bos taurus
gacagagttgttgataagaaaatgttgacagatttagaagacagtgcaatgcaagacctttttttttttaggtaccaacatgtgtgactatagcaatgagyacattgtgaactgattaagcatgattttagagaaatgctgttctaaaaactttatgattgtcccttttctagtaatagtactaagttctcttttgactgt

SEQ ID NO: 36860 - DNA, 201 bp, Bos taurus
agtcagacgtactgtaataacacttgtgaaggtattccaacatgcaattgttaggggcagcggaggtccagaataaactagcgtgagagattattccatcrctggcatgtaacttctcacaggtgaccaagcagtgtcacaccattcacatggtgaccgcgtcagccaatccgagggcaggtccacggggagtacagagtg

SEQ ID NO: 36861 - DNA, 201 bp, Bos taurus
atgtaatttggaaaagagatcgctggtttggaacatgatgctgatgtaagaatatctgtctcctctaggtcatataatagagaaactaaaaatgtgtgctrcctaccatatacacatatccagcagtcagttatgctttacttaataaatattatttttactgaagaatggggtataattgagagaaactgaactttcaga

SEQ ID NO: 36862 - DNA, 201 bp, Bos taurus
ttaagcatcttatttgtataattcttagtatcaagtacagagaaagcccagttgtcccttgacagcttcttctaaattcttcatttcctctattatcttcygtaccattttaattttctttattctcttagctgtattttcaagaatcttcatctattgttaactaacttccttatgtcatcagcttttctgcagaatagt

SEQ ID NO: 36863 - DNA, 201 bp, Bos taurus
atttaaaaattaaaatctcctaatccttagcctggtacacaatgctttctgcagtaagtctcatcataataaattcccttatgtctctactttcccaaacktacagttcacttcccttacctccatttattaaaattcgacttagtctttcatatatagctaaaatgctcatcacaacttgcactattctcatattcctaa

SEQ ID NO: 36864 - DNA, 201 bp, Bos taurus
caacagtagactaggctctctttgtctagaactgagtcaaggctgtcgaaagctacaacgaaaagatgagcttttcattctgtaggttccacagtagaaamgaatatatagcagaggaacagagtaactaaagagctacagtggacacttagtaagatcacaaagagtatctttatgctcatgatctgttgactattactt

SEQ ID NO: 36865 - DNA, 201 bp, Bos taurus
gcccttcctcttgggagctgccatagtatcctacaggcatcaaaatgtactgcagtgatttgttttcatgtacatgtcctttaagattgcgctcctccttrtggccttcttctggggggttcttaggagaattgaaagtaaattaatttaaaagcatgcaaggcatttgcaatgttgtgagtgttccataaacattagcag

SEQ ID NO: 36866 - DNA, 201 bp, Bos taurus
ctgtgaccttcagtagaagaatgcagcctaccaaaggcaacctctgcaagaataaatattaatatctgcatctgctctcttctgtccctttcatctgcctrggctcaccaccaacccaactcaactagaagctagaggcaacatcagacttctagggcagaacatggtagagaagagtggactctggttctggaaaggaaa

SEQ ID NO: 36867 - DNA, 201 bp, Bos taurus
aaatggaaacatgttaacaagtgtggctgtgactttggatctagcacctatcttcataactggctggcagctgcttttcatctaccaggactgagacaaaygggactcaggtcaacttgagctctttattttgacattgatttatctggagtagaagcattatttttgaggggggggtgggaaacatacaacacatcatgt

SEQ ID NO: 36868 - DNA, 201 bp, Bos taurus
aaagcatatgccatgaatttatcactgattaaatatatggcccaacatgttttattatggtaacgttggggaaaaaactgacctgactcttagtacaacayggtccacagacctgtagcatcagatccctgggagcctgttacaaatgcaaaatcttgggcctcaacccccatccctactgagttagaagctctggggtag

SEQ ID NO: 36869 - DNA, 201 bp, Bos taurus
gatttggtgaccatgtttgcattatttttaaggctctgttggtaccaagtgctttaacagtcttgaagtacgaagaaaggaatgtacaaacaagacctctrcactacgtatgtgaaggggaaatggcctcgtggaaaaagagtcatttaaatggagaaaaggtaagagatctgaatcatcccccaacacaaggaaatacag

SEQ ID NO: 36870 - DNA, 201 bp, Bos taurus
caccatggaaactcgctcctgagcccacattcctgagttcagctcactgccatgcacccctctccttgtcccaccacccgagggggccactccaaccaggytctgcctctgtggcttgaatgtggctcaggcatcagtccctttgttcctccaactccagagggtacctgttgagctctctgcaggccttctgaagcctca

SEQ ID NO: 36871 - DNA, 201 bp, Bos taurus
gagccaccttgggaacctagctgatgataggggggttccatctcctaacttgtccatgtaagtattttcacatctgtgcagagggtgagggagggtcttayagaagtaaaggagagttgttgttcagtcttttcagaactctaaattgtgtttaccacttactccctccccaactatttttgggccatacattgcagcttg

SEQ ID NO: 36872 - DNA, 201 bp, Bos taurus
tatgaaatgaatgtcccttctgtccagcttttctgccacaatttctcctcagagactctgctctaaataaaagccttcctctaggcttttatctgtcattytcatggtcaagtcatatccatctcgtgagatcgcttttcctcttttttttttcctgaggaaaaagggctctacctctctctaacttctgtttataaacca

SEQ ID NO: 36873 - DNA, 201 bp, Bos taurus
atccaataacgtttttttaaggaaagaattaacattgtctcataaacagtagttgctcaataaatatttattacatttaattaaaaaattcagatatttamtataagtagccctaagtacctttcttattcttatctatttcataattgattgtctttactttctggttttattcattatgcgcagaaggagatctaaaaa

SEQ ID NO: 36874 - DNA, 201 bp, Bos taurus
gagatataacactcaggccacaacaggttctaaatgtttttcttttaacgatgaaaaggagatggtcttcaaatatcagcatgatgtctagttaaaagtaygggtacagaactttagctggccgactgactgagtcaacgggagaaataatggaaaaggagtgtggattcagagagccgagagagcatgcttgtgtggaaa

SEQ ID NO: 36875 - DNA, 201 bp, Bos taurus
gagggttctttaccactagtgtcacctggaatggaccccatggattttgaagtaagactcacttagagtcatgttggttgctgccacttactagctgtctyatcataaggccatcatttcaagactctaaatctcaatttcagcatcagtaaaatggggataataggtgcctcatggaattgtcatgaggatggaatgaca

SEQ ID NO: 36876 - DNA, 201 bp, Bos taurus
ataattaagtatccatccatatgttttcaaatagagacaaatactgattgttcagataattgattccctgcaatgacttcccattcagtcatgtttttaargccaaaacatctaataaagtcaatgtttttttagaaaaaaagaatagagtgtagatgacttctcagcaattttgtagtaagttcttggagtatcatgtag

SEQ ID NO: 36877 - DNA, 201 bp, Bos taurus
attcaatttaactaataattatttagagtctaccaagattctgttcaggccatgtggggtttcattgtgtattcttctacatgaggctaactataatgtayacaaaaaactaagggattgggccaggctaattttgccttttcaacggtaatttaaaatttagagggaaaaaaattgatttattatgagatgaatagaggt

SEQ ID NO: 36878 - DNA, 201 bp, Bos taurus
ctcaatgagtcaagaatctttgtttcatcttgatttcatgattctcctcctttggggagggtcgcctcaatctccctgccctctgccaaattgcttctctrctcccattccagtttaagctctctttactggcaattgagtgtttcatggtgaaattcctcataacaaactttcttggacaaaaggccaatgccagatctt

SEQ ID NO: 36879 - DNA, 201 bp, Bos taurus
ttgaattttggccaaagtgttctgggtggaagataacacctcctgctcagcaacactgtaagcaagctcagggtttggtctggcagcatctctgagaggaraggcatggccctctgctccagtcattcagaggctgatgagtgaagtcactttggagggctgactctccgagctgtgatggaaccaaattcagacttgctg

SEQ ID NO: 36880 - DNA, 201 bp, Bos taurus
tctaggacatcaagccaagagatatgagtgagtggttgcccattgggagcattgagatatggacagcaaaaactctagggcagtcgtctatggggacagaygactttcgctgctggggacaatttgcttttattacgctggtcttggtacagccccttccctcccctgcatcacatgttgtcagttcttccagggggtctg

SEQ ID NO: 36881 - DNA, 201 bp, Bos taurus
ttctttggcagtgacccacttcagtggccatggaaagactgaatggtcacttacttggggtagagtaataatagtgacacatggcagtggtgatagctgtrctgagggcctactatgggccagaaaccatgccacacgttctacatgcattctctcctctaataactacagtggccgtgtgtgtgtgtgtgtgctcaattg

SEQ ID NO: 36882 - DNA, 201 bp, Bos taurus
caaagggacaaaaacaatgaaaaataaacaaaagatcaaggatgaaaaaagaatttcttcctcaaatgacagaggataatgctttatacaaaaaacaaggrcaaagaaattgtgacacccttggggcacactgccttcatttgtacagcaaaattgctattttcttaatctagaatcaaattatgagggcttgatgagtat

SEQ ID NO: 36883 - DNA, 201 bp, Bos taurus
tttattgaatatgtactacatggtaggagtacaacagtgaataaatagacatgtctcaataccatggagattaccttctggttgggtatttctaagaaggraacatttaagctgagccctaaagaactaggaagaggcagtcttacacaagagaaggggggttccatggagagaaaatggcatgcacaaacccctggggtt

SEQ ID NO: 36884 - DNA, 201 bp, Bos taurus
tcaaagagtaactagaaagtagacagagcacatagaatcatattacaaatatcacaagagggtagagcagatctcaagtctccaagatcgcaaagaacttkgtcgggttgagccactgaaagaccagtgaggcaggagcacagcaagagagaagagtagcaagaggccagacacggttttgtgagccatgatgagagttcg

SEQ ID NO: 36885 - DNA, 201 bp, Bos taurus
agatgctaggtcactggccacttcgcagggtcccaccatcctgccaacgtcttggccatccctctagtgcacggctgtgtgcctccggccctggagcccaygtgtccactctcactgggctctctgtggactctgggacaggctccatgtggggctgcccggcaggcaggctggcattacctaattgccggccaaggtctt

SEQ ID NO: 36886 - DNA, 201 bp, Bos taurus
gtatggtagtagtattcataggtggtgttttcactaaaaaaaagctgcttaatttttgattacccagtgatatttgaaactagagttgagattttgaccargtaacataaggattggtttttaaggcagcctttttagtcaagtgtgcttcaactttatgtgaaattacggatcgtgtggacaaagatgagataatgtaat

SEQ ID NO: 36887 - DNA, 201 bp, Bos taurus
ctggagaatcccaaggacagaggagcctggtgggctacagtccacagggttgcactgagtcggaccagactgaagcgacttagcacgacaacacacatacraggcctgacataaagggagtagtcgtcactgttactgtctgttaccaaacagccctggagtgcctgtctgaccgacccagcgaacagtcagtcccactct

SEQ ID NO: 36888 - DNA, 201 bp, Bos taurus
aagtacaggcccctgtgggactgcacaggggacagccacatggggccgattcattattcgaatgtggagtgtagaacctcttctcatatggaaatggttgyggcatgattccgagtagctaaactgctctctgtaagaatatgacgttcaaaggcagaaagctggactgtttgacttaccaccacatccctgaatacagaa

SEQ ID NO: 36889 - DNA, 201 bp, Bos taurus
taaggaaggacatgtccacaccttgacctggttctgaaaggaggggaagaaacgaaacctcattacattagaaaacaactcgccctcgggcagcggcctcrattaggttacctgttaatactgtcatttgctaactggattccacagtctatttgcaacactgttttataatccacgtaagctttctgatactgctctaca

SEQ ID NO: 36890 - DNA, 201 bp, Bos taurus
agttggtgtatatacaaagattcagtagaaatttgttctaatcttggatctgttactgtctttctgatatagagccatttatttttgccttttttggtctyagtttacttatgtataagaaacaaagcgtccttttttagcactaatatgtaattctgtgagtttatgatattggagattttttaatctgtaactgtatat

SEQ ID NO: 36891 - DNA, 201 bp, Bos taurus
gaaattctccaggccagaatactggagtggatagcctttcccttctcaccccagggatcgtattgtcagtggattctttaccagctgagccaccagggaarcccaagaaggtcactgggcccaggacaccatcagggactcagtttgtaacaggaaaaaaagtgtgtagggtaatgaaagaacatgaactctggaggtaca

SEQ ID NO: 36892 - DNA, 201 bp, Bos taurus
tcataatcctttgaatttcctggccatcatttataagcatggaatatgatgaaacactctaacaagttacagtcaagtttagaatcaaaattagtatatgrgaaaaattatgtgctatatagtgtgatatttaactcatgcacaatagttgaagataagactaatggaagctatggtattgtaaataccgaacaacaacaa

SEQ ID NO: 36893 - DNA, 201 bp, Bos taurus
agagtgaaaagagtgacaatttatacttatagaacaatggtggtataccaaacattttgcattacttcccttgcttttcaccataggcctataaaaacagrtaccactggtcttccccattctacagagaaggaaactgagttaaagaggtaaagagacttatctaggtcatgtggttaacaaatggtggggccaagcttc

SEQ ID NO: 36894 - DNA, 201 bp, Bos taurus
ttggtcaaatttgctttctgtcgaacatcattttccatagtctaaaataaatataaacagcaagtaataagtcattagtgaaaaaacataaagcgagaaaygtgggataaaatggtgtataacataactccatttattaagaattactccaatggcaaatttgagcaatgcaaaatgcaattacttttgcaccaacctagt

SEQ ID NO: 36895 - DNA, 201 bp, Bos taurus
tcctgaaggataaggagttaattaggcaaatgaggtgacctaagaagtggtctcagcagaagcagcagccgatgtttttctttaaagactttttgagcaaycccactcttgcttaaggtttaatcaccagatgcagaaagtctgttgattccctaactgcctgagctctctcccttggggttaaaaaaatgcatatgctgc

SEQ ID NO: 36896 - DNA, 201 bp, Bos taurus
aaaagtctgactagtttaaaattttacgctcaaatgtgatttaaatctcacctgatcattccctaccctgtgtctcaggacaggccaccacagtggtttargatagttggtatgctttctcctctgctgggtctcgctcttggggagatgggcagtgagagggaaggggtgaggagcaggctagaggaaggccagaagagg

SEQ ID NO: 36897 - DNA, 201 bp, Bos taurus
tcagcctcttctctagcttcttcttctccttctgttcccggatctggctcttgaatgggtcgctgtgcttgggctcctggggcccatggtacagccaatcrcgggagagctgcaggagatcctcctcggctgggacgcagatcagggtgtgcgggccagggctgcccttccccagcagggccagcctgacccacaccaggg

SEQ ID NO: 36898 - DNA, 201 bp, Bos taurus
cctggagaatcccagggatggaggagcctggtgggctgccgtgtatggggtcgcacagagctggacacgactgaagcgacttagcagcagcagcattggtrtttaagctataaaacttctggaagaagtctgcaagaaatgggtggcatttttatcaggaaagagtgggacagtaattacactgagaagcagagggctggc

SEQ ID NO: 36899 - DNA, 201 bp, Bos taurus
atccagagttaaatgagcagttagaaaaaatggaactctagcacttgaaggtaaggttccactaactcagaaagtgtggaaatgttggctaaaaggccctrcgcctggctcagaactgactcctcctgcagtcacagtcataattctgggatgagtcaaagtactcccgtggggtccacccaccagtagctggccatggtg

SEQ ID NO: 36900 - DNA, 201 bp, Bos taurus
gtagttctagctaatgtcacaaaccaacctcatgtaccaacttactaaaaaaatttctcagaaccaaattagaatagaaaagtgccactcatcttagatayacatgatggactgttgacaaagaagaaatttagttttaatacttcagcatatcattagggagacaagctgactgagtgaaccgagcctggcatttatcac

SEQ ID NO: 36901 - DNA, 201 bp, Bos taurus
ttgctcttcacatatctcacaatttgtaaccatattggattgactattgttgtaatttcttctttttttttttccttcctgaccaagaattagtaagctayggcccatgtgccagatctgtttttatacaacctacaaactaagaatgacctgcacacaaataagttatttaaaaaatcaaaagggagactaatattttgt

SEQ ID NO: 36902 - DNA, 201 bp, Bos taurus
cttgaaatgttccttttcaatacatatcatggacttggtgtctatgtaagccacagaaataccaggtcattcagaatacattacaatatgactgttgtggraagggcataaaactaaagtcataaacctaaaagttacatagatttatgaaaaacattttaaaagaaactatagttcagggtacttgggaccataaaaatg

SEQ ID NO: 36903 - DNA, 201 bp, Bos taurus
atcctaacttctagatcttgaaaatgcgtacttagtgaagagcaaattactggcatgttttctggttaaatcaaaccctggatagctagagttgtgaaaarggtaataaagtttttataacaagcagtaaatacaaatctctgttaggactgatggaagaaggtagttcatcgtctatatttggcttatttctggcctccc

SEQ ID NO: 36904 - DNA, 201 bp, Bos taurus
actcatgtactctattttagtgatgagcagcataaacagtcataaatgttcacgctgggcaggatgcactggaaatgcgctgtggtggcctgaattaagcrctatgtctcactgcaagctaatgcgacagcaataccacacagtgctcgcagtcactgcgttgggaacattactttcagtgggaatgactgaagacgttgt

SEQ ID NO: 36905 - DNA, 201 bp, Bos taurus
tcaacaaatggcatgcagcctcatacagcaagagagccaattcaaacagagacaatgtttcagtaaaaacctagcataagcaatcccttggtttcacaggrgaaggcagtatgtgctgtgattcagaatagtatgatgatggtagcctccaatacacctcaccttaaatcccagcacactgaatctcaatctctttatcta

SEQ ID NO: 36906 - DNA, 201 bp, Bos taurus
ataaaaagtacaaagggagtaggagatacatctttccagaagattggcagggattctcagaggaaagatctctttgagtagacctttgtattaaggggccyagatttttaatgatctaacagattattctaaagaattgggctttatcccagtggaaacagagggtcacggaagaattctgaacgtagaactgatatggtt

SEQ ID NO: 36907 - DNA, 201 bp, Bos taurus
aagtcatgagattaaaatggtaaacaaacatgcttttcaacaacataggttgcataaggcatttccctaatcaaaatcaattttctcagtagttttccctyggcaaacataaacattttattcctgcaactcatttttaagtgagctcctatgactttcatttgtaccttttttgtttgtttgtttgttttgtttgtttaa

SEQ ID NO: 36908 - DNA, 201 bp, Bos taurus
gtcaggaagatctcctggaggtgggcatggtaagccactccagtattcttgcttggagacacctatggatagaagagcctgtgagagggttaggcaggaargccaggggtctccaaatggaggaaataggctgcaagtgtcagacatttttaatctcttttaagcggcaggaggaaacaaactagtgttatattttttccc

SEQ ID NO: 36909 - DNA, 201 bp, Bos taurus
tgagaggctacctttctaacaagccacaagtggagctgatgctgtctctgaaccatccttgaacagcacagtaactcaatatataaagtgaggggaagctmtggccatttaatgactgcagctttatagattcaatgctgttatattttgggaatcaaacataaataatcaacagtgatcacaaaaaagtaagtcttagaa

SEQ ID NO: 36910 - DNA, 201 bp, Bos taurus
ccaaagtgttgcttactcctgtgtttggctcagggtctagaagaatttgaagacaagaactttctgcagggactttctccatagggcaggcttgcagaacrgtggcctgagtgtagttggatttcttacagcttggctcagggtgacaagtgcaaatgttcaggcaaacgaggttgaggttgtgttgcccttgctgaccta

SEQ ID NO: 36911 - DNA, 201 bp, Bos taurus
acaaaggtctgaagattatccactatggcccccagcgttctggcaagaggctttctcactaccattctcctatttgtcctagaggccccgctttgggtttwtgaaggctttgggatttggatatattgttggaaccatgtaaagtcctcattcctggtgaccatgtaaggccaccatctaaacaatatctttagtatggtc

SEQ ID NO: 36912 - DNA, 201 bp, Bos taurus
ctgttcggggagctaagatcacatatgccacgtggccaggcaaaaacaaaaagctatccttctatctagcctgtttcctggctttttgcagggctgaaatktttaactttggccacgtggctacgatgaggctctaaaatatagtactgcaatttataaaagtgaagttagttctcttcttggtatctgctgagtatcctt

SEQ ID NO: 36913 - DNA, 201 bp, Bos taurus
gaaaaatggtttgtgaaaccagtcctgtagagattgaaaatcttacctattatttgggcagacagcatagatgtgtatgctggccatcaagcaccagctcyggcgacccctctcgtgggtcttcctgacgttggagaagatgtagtttcaaggctggctctgtgtggtttgcctgatgtccattttggccttcagggaggc

SEQ ID NO: 36914 - DNA, 201 bp, Bos taurus
aggggctagttttcacttgtaaagcaattaccgccagtaggcaaaatactttaggaggcagagacactagcataaaaatcatggtggagtattgctccackgttgtagattttgtaaatgctagacacaggctcagtatgttttgcacttgtaaacgttgtacaatatccaacatagcttataaggtatcttgattaagat

SEQ ID NO: 36915 - DNA, 201 bp, Bos taurus
caaaaataaaagtcaaaactttaaattgtcattacctagaaatgaaagttggttgaaccagacacaatacatttatagatatttatgtgaaatgttgaaawtaaagtctgtggtttttagtcatttttacatagaaatagtattaaactgacaatgaaaatcaatggtacatattattttgcaaatatttaagtttggaga

SEQ ID NO: 36916 - DNA, 201 bp, Bos taurus
gatacacagagacagagaaactaaatttacctggggaggtggacaaagcttcacagaagaggcatttctgaattttgttttgaagggttaaaaaattttgyaagactgacagaggtaaacaaaaagatattagaaaaacaaatccagaccttcagaaagtttcagaagacaacatacagaatgatactgcatttataaaac

SEQ ID NO: 36917 - DNA, 201 bp, Bos taurus
acccagctgcagtttgctaatagtcacaaagacagctgttctaaatattctgtgctgccttaccactgttttgcattatacttgtctcattttttccccayggcttttgtatttcttgccatgtcactgcaatgagaatgtttaaaaggagtgaaaaatcctgtaaacaggtcacattatgtaagagaatggaaagtgtaa

SEQ ID NO: 36918 - DNA, 201 bp, Bos taurus
taccttattctactcctaaatgtacattactccacattcctggactgatgggaaaatccaaagggtctaaggaattatggaaaacaatactaatcctcatygaatctaattgattgtttctgtttgtgtctacatatacaggctggttagaattggtacattttgttagaacatcaatagaaaacaaacataaaaaaccat

SEQ ID NO: 36919 - DNA, 201 bp, Bos taurus
aacttctctagattgaaaagaaatgcattttttgcaattatttgggataatttcctttgggcaaatacatcttggtggaaagtaggaggaaagttctaacrtagaggcagtgatagaagataggagcctggagatatccattccactgtggatttgacacatgtacaaggaaaccctaaagttacctatatataggaagga

SEQ ID NO: 36920 - DNA, 201 bp, Bos taurus
gaaggcttcctctgagggctgggaggaagaatttattccttgtctctcccctagcttctggcagttgctggcaatccttgctggccctgggcttgttgackcatcagctgatcctgccttcactgtacctggcattctccctgttcatgtgtgtctgtctctacatttctccttttccaaggacactattagagtagtggc

SEQ ID NO: 36921 - DNA, 201 bp, Bos taurus
gccaccagggaataaagcaatgagatgtgtcacatgattatcttgtaggcacttttctagatgttatagaaatcagaaagacattttctttgatagcatcraagaaaatgcatcagtcaaaatggtgatgataaataaaggagaggcatacatttttaaacaggttattttagaatcatgtgcaagtttgatttaatgaaa

SEQ ID NO: 36922 - DNA, 201 bp, Bos taurus
ttagctattttgattacccaatatgcagatttttgtaaaatttccaaatatgactatgcaagtctgaatgtgtatctgatgcttttctaagtgctttaatytgggtcaggatacttctagaaagtaattattgttataccaagttttaccattaaaacattggaatctaggggtgggtaatttcttacaaccacaattcac

SEQ ID NO: 36923 - DNA, 201 bp, Bos taurus
tttgatacaacaagcggccagggtactaatcttggtttctgaatacaaacaataggcttttttttatctaaatttaaatagaaaccagtttattagaagaygtaaaaaaaaaactgtcagagggccatggaaccttgtttcaaaactcaagtcaggaacttccctggtagtccagtggctaagatcctgagctctcagtgc

SEQ ID NO: 36924 - DNA, 201 bp, Bos taurus
agataaacaggggtaagttctcagagaagacatcaggtcaatatggccggctaccagtgatgtgggagaatctctactcttccacttcaaatccacagaayggttgaatgttgtccttagttgaatgagtagctgaaactgaatctgccggttcaaaaatcaagaaggaatttaaagtaactgttggaaccaaagtggtcc

SEQ ID NO: 36925 - DNA, 201 bp, Bos taurus
ttttatgaatattgcatattagacttcaaatttgagaacaatgacaatattgaactcatttttattttctccatactcagcagtcagtacacacacaacayggatgcttaattaaggtttgttgaattaacagtattaaaataaccagtgaaagaataaattatgtgcttctattaacttattctctaggtaaaatagcta

SEQ ID NO: 36926 - DNA, 201 bp, Bos taurus
ttaactctttattggagagatacatgaaaatgttagctttcctcagatgaaaaccaacatgtattaggaggcatgagaaattacaaaaagaagtaatacaygggtggagatcagtcacattttaaaaaggcaaattttaaacaacacaaggttatgagtaattaaatactgagtgaaaacaaatggcctctgtttaataat

SEQ ID NO: 36927 - DNA, 201 bp, Bos taurus
gcctggcgtgctgcagtccatggggtcacaaagagttggacatgactgagtgactgaactgacttcattcatgaaggtggcacccttatattcaagtcatytcccaaaggccccatctccaattagcactattttagggatttagctttaacatatgcttaagggggaatcacaaaccatcatccataacaacccctaacc

SEQ ID NO: 36928 - DNA, 201 bp, Bos taurus
aaacatcccttccctcagagatgcttgccttgatttccaggacaccatctgtggctagcataagttctttcagtataaccatcccccaaacttgtatcgcrtttcatttcattcatccctcttactcagggcctctcagtgacgccaacatgcaccttcttagtacagagacgctgcccgaatgattcagcacatggtcac

SEQ ID NO: 36929 - DNA, 201 bp, Bos taurus
ttttataaactctgtagactcaaatttgttgaggtttttcattacatttaatcttgtatttttcctacactagccagctaccttcatctgcatgactcccrcctcgccatcccaactgtaacccttgggaattcatatgccttcatttgacagactctccagatccgttctcttcccaatcttacatttaaaattcaaaga

SEQ ID NO: 36930 - DNA, 201 bp, Bos taurus
cagggaggcctggcgtgctgcagtctatggggtctcaaagagtcggacacgaccgagtgattgaactgaactgtactagtagacccaacagtcaggcctgmagaactagcatatttctcttcagtaagatgtttcaaaatttagattcagagagaagttggagaatctactttggcctcaaggtttagactgaatttctca

SEQ ID NO: 36931 - DNA, 201 bp, Bos taurus
aatataacagtaaaaagtgtcaaccacagattggccctctccgtgggggcttgccatcacctctacagggattaaatcaagtgaagcagcagctgcagacrtttaatggcccctgaaggagtttagggtggagagcagaagggaggcaccctgtgttcagggaaaaactggcaggacaggtcttcagacagttaaatactg

SEQ ID NO: 36932 - DNA, 201 bp, Bos taurus
tgtgggatcttagttcccccaaccagggatggcacccacacgctctgcagtggaaagctcaggagtcttatttcctcggccaccagggaagtcctcccctkactcagtttagattccatcgtcagtcactaaagttactcccgtggaccttcagagcacaatcaccttaaccgcttggccacctgtcccgtgtaccttcaa

SEQ ID NO: 36933 - DNA, 201 bp, Bos taurus
gtagcgggtacaagaggacaatgactgtgaagctctatagataggacgttcagtcgcggagcaccaaagacaactgctctcaagatgttataggtatgacracaagaggacccttccagagacccaaactgcatttaaagcctcagagtactcctaacagatgtctcctctgcttgtatctccttatctagctttcaggca

SEQ ID NO: 36934 - DNA, 201 bp, Bos taurus
atctaaggatggcaatgggagataatctgataaataagaggctacagcatcagagcctgttcaatgctttcctggtacccagaggaaaggccagtataggstttaccagatacaatttcagttgagattaaagacagaattaccagagagaacaagtcagctttgtacctcagttcagttcagtcgctcagtcgtgtccga

SEQ ID NO: 36935 - DNA, 201 bp, Bos taurus
gaaggtcgaacagcccggtgctgcagaagcctcttggagacagacatgtgaggagtgttgcgggggaagacagagagttctgtagtaggaggggcagcccsgagtaaggttaatgcccctttttcccaagagcatcaccatccatgtgagttgaaggaggtctgcactaagaccaggggaccatcagggctcaagccgaaa

SEQ ID NO: 36936 - DNA, 201 bp, Bos taurus
atgacgtgaaacctaagcattgataaggaactaaactttgaaaacaacatgcactcaatttttaccttaccttcagaaaaaccccaaccacagctataccrtcggcatgcttcagagcagttgcataactgttatactttgaattccagtgaaccaaatggagctgaaaccatagaacagacgttaggaggtacatgccta

SEQ ID NO: 36937 - DNA, 201 bp, Bos taurus
caaccagagatggaggctgggtcacaacagcaaaagcaccagatcccagcgactagactggcagttagtgacaagggccctggccctttggcgctgcagaraagaacttccacaaagacaggagtggtgaagcaagtacagtatttattaggaggaaaagtacagtacgtatggatagacacatgggcagactcagagaca

SEQ ID NO: 36938 - DNA, 201 bp, Bos taurus
tgaagtgtcgtgaggatgaaatgaggatggcctaagagaagctgaaaaattcacttcgaatgaggatgttaagcttaaatctaagctctgacacgggcagragagttggccattggaaaagatggaagatgagctctgaggagatgaaggtcctactagctcagtagggtgttaccagtgatgccaaggaatgcatctgcc

SEQ ID NO: 36939 - DNA, 201 bp, Bos taurus
tgtaaggcagcaatgctccaagtattggccacgaacctggtgccctggtgccgatttgagcataaactcatggagcttcagcatccctcagtcacacgagygccttccaaaggcctggggaggccttatcaatgtgcttagaaggttgcatgtttgcataaaagttgccaaagtattttagctgcatttggttaaaatgat

SEQ ID NO: 36940 - DNA, 201 bp, Bos taurus
ttttagattccgcacatgagtgttatcacatggtgtttgcctttgtctgtctgacttatttctcgaagcacatttttaagtccatccacactgctctgaayggcagtatttctttctttttagactttgtattattccattgtgtctatgtctgttttctgtctatttatctatcgatctatcacctcttcttaaaacaac

SEQ ID NO: 36941 - DNA, 201 bp, Bos taurus
gacttgctcaagagtcaactatgtttgtttaattttaatgaaatgagagactgaagtgtgtttgtttttgctaaaaacattttacttccccaatgactcaktggtaacctccctgtaatgtgtctcctaagacacaagggatgcagatttaatctctgggttgggaagatcccctggaagaggaaatggcaacccactcta

SEQ ID NO: 36942 - DNA, 201 bp, Bos taurus
ggagtgagagagagtctcagagaaaagttgttcacggttattctgacaggtcttgaggagaaaaataatctgtgaagacttcaggtgtaggtcagaggcgrgctgcctttgaacactggtgtctgggagtcctcactgacttttcaagtcagagtgagtgtgaccacaacatttcttttgggagaacagtgagttagtttt

SEQ ID NO: 36943 - DNA, 201 bp, Bos taurus
aaagaatatgtcaggagccaacaagttcatagcttgtgcctaaaaagtatctctaatattctataaactatgaattccaacagataaatgttcattttggytgcaagttagtgggtgcttacaaagtgctgactatgggacattcattacccttaggcactgaagcgtcctgaagggcaggcttatttcccattttccaga

SEQ ID NO: 36944 - DNA, 201 bp, Bos taurus
attgcaggcctgtctcccacatctgtatctgagcctctgctccatcctctaagaaatgggagaggacacagtaaacgctctgctggctagacctctggtcyctctggccccatacgggacacagagcgggccaggccactgcgggttaatatttgttaaccaactgttccttacttatggaataatttgatatgttatttt

SEQ ID NO: 36945 - DNA, 201 bp, Bos taurus
gaatagactgaggactgaggatttataggggagcagtaatattctctatgatactaaaatgatagcttaccgtcatagcttattattccacacccatagartacacaccaccaagagtgagccagctatggatctgggtaatttcaatgcaaaaatgcaggttcaccaatggtaacaagttgtttgggggctagggaatat

SEQ ID NO: 36946 - DNA, 201 bp, Bos taurus
tacctacagggggactggccatcactccagcaccatcctcactcacctgcagtcacattcacaagggccctccctgggccctggcctcacccactaacacrgagatgccagttccagaatgcccactgtccttcatccagacactctgggaccaggttctgtacgccacagcgctggcactagtccgaggacccttgggcc

SEQ ID NO: 36947 - DNA, 201 bp, Bos taurus
gggagagaaagcctttaaggcaacaagacattatccaagggaggggtttaggcttatcccctcccctgcacacacggcacacacttaggcgagagggccarctccaagggatctaaaaaactgagtgggtcactttcaaccctggagaccagtgtctcaattctgaccacaggcttgctgagcagagatgtgccggccagt

SEQ ID NO: 36948 - DNA, 201 bp, Bos taurus
aggatgtgacgaatgatgtgactgaaaaatgaacagggccaaagggaatgacggtgcaaatgctgggttggtcagaaagcttgttcgagtaagatgttatrgaaaaagcttgaagaactctttggccaaccgcataacacggccaaatgtccagtgacttggaggaagaagggcagtgaaaggaaacgtgtacagctggag

SEQ ID NO: 36949 - DNA, 201 bp, Bos taurus
atctcattgcaatattttctttagccacattttattacagaacaggaataattctctgaagcctactttggcaaatatttccatctgtttgttgtttaatmttttatttaccctttaaaacaaaactacagtgtgtttgataaaatgataacctattgtaattgatttttaatatgctgtcctgtaatctctttaatttct

SEQ ID NO: 36950 - DNA, 201 bp, Bos taurus
aggtgcaatacaacccgagacctcaaaaatcagaagaaatcagtcacgcacaaagctaagagcaaaattcccatgcagagaactggccaagactttctggrcagaaataacactcccttgtggaaccgagaaagactgtagctgcaacataatcaacaagagggaacaagacaaggttggagagataagcaggaaggaaag

SEQ ID NO: 36951 - DNA, 201 bp, Bos taurus
gaggagtctggtggcctacagtccatggggtcacaaagagttggacatgactgagaggctgagcatgcacgcagcagacggttcctatgatcagcaagttyatacagcatggagacgatgcagtgtttttctgggctgatcttcagaccacggccaagcagattatgcaaggagctgctctcccgagttcttaccaaaaat

SEQ ID NO: 36952 - DNA, 201 bp, Bos taurus
cttgctttcgatagaagatgtgtttacaatcaatagaatatggcagaagcagtgggatgccagttttttgattaggttactgcatatggcagagtctcackatcttaattgttacgttatataagactttgttctagctgaccaaagggacagaagttcttctgctaaccctgaagcaaatgagattcaaagcggattctt

SEQ ID NO: 36953 - DNA, 201 bp, Bos taurus
aggagaggcggctcgggcaggttcctcagacttaaggactccccctgctgcttgggcggattcgctgctcgtcccttctcggtccctaggggtgtctctcmgcaatgcttcgagcggtaagtgtgggacttgctgctattaaagtgcgcggagcttcaggtaaggcatcagagaaatgaatgcgtgattgtattttacccg

SEQ ID NO: 36954 - DNA, 201 bp, Bos taurus
tccacaatagtgtaggagggctcccttctctctctataccctccccagcatttactgtttgtgaatgtttcgatgacagccattccggctggtgtgaaggsatatatcattgtagttttgatttgcatttctctcataattagtggtgttgaatatcttttcatgtgccttttggccatctgtacgtcttctttggagaaa

SEQ ID NO: 36955 - DNA, 201 bp, Bos taurus
gcttacctttgtgtttgcttatattaattccatgggtataaatgtctacctgattttttctggattcataaagccttgggtagcaattaactctcaaaaawttttaaaataaatattagaagtagtagctttatatttaagactgcattctctgacagtcatttcaaatgttatcaaccatattttttctttgtatgtact

SEQ ID NO: 36956 - DNA, 201 bp, Bos taurus
atgcagatgagttgagagaaaagtctgctggacagctctcaaaagaagtaaagcaaagagattctgggaagatggtttatagactacaggcctcttcctartctgtcagttttttcctatctgcatttcctgagccagaaacaagaagcctctagctctctttgagatctagcagagagaaatggtgtgtggcctttagca

SEQ ID NO: 36957 - DNA, 201 bp, Bos taurus
tctgctgagtccaaggtggtccaaagagaagagtagacgaagtgctctctcatctccttaaaaataaccaaacccgcttaacctcccagggctgagaaagrgagaaacaagcctatgtatcaccctttaaccagcagacagttttcttatacaaagcagactcagttagaaacctgaaatttggctagataaattaaaact

SEQ ID NO: 36958 - DNA, 201 bp, Bos taurus
aaattgtttgaagaaagtaatcctggggttttagatgtctctatagcctgctgaaattaagttaagtctatagtacactaggttacccactccagcattcrtgcctggagagttccaaggatgcaggagactggcaggctacaatccatggggtcataaagaataggacacaactgagtgactaacacacacacacacaca

SEQ ID NO: 36959 - DNA, 201 bp, Bos taurus
attaataatccttatattggtgatcaagttatttgcagttacttattaatattcacaagcctgtaatgagcatatttgttgatagttattctgtacctagrcatatatttctgtagaaagaggattcgtgatagaactactgagttaaaggatgtaagcaatagtcactgccaaattatattttaaaaggctataaaaagt

SEQ ID NO: 36960 - DNA, 201 bp, Bos taurus
gccatagataattcacaggtggattctaattattgattgtggataataagaaagaatccagtcctccaagttagaaactttcaagttcgattggttctttstgctccaggccaagaagcctgccatccacaacagaagtctctggatctgtaaccagagggtaagctatgagcactgtgatacgccaatcatagcagatga

SEQ ID NO: 36961 - DNA, 201 bp, Bos taurus
taatagaggataccagcataccttcccagcttttattttatagataaggacattaaaaccaaccaatatctgagaatgttaatgtttcataatatacccarctcaggccataaaatcaaaaaacaagctacacaaagcaagtcagtgttaccaacagctcgcaattcagacgtgcgcaagtgcctctagatttttgctcat

SEQ ID NO: 36962 - DNA, 201 bp, Bos taurus
atagtatacctgcccttacagagttcacagcacagcgtgttatttctgataaattattttcttctaaaatgaaacacacctctgtcgaccatctcagcagyagctgaaacaaggcctttccagctgcatgtaaaagaaaccatgctgctagagtcctgcgaaattcaaaagagaaaatgtcatcaataaaatgctgggaat

SEQ ID NO: 36963 - DNA, 201 bp, Bos taurus
tcaagtatgtattacatgtctgtaagttattcaagacaggaccaggatctgtgaaggacctgacagagaacaccgccaaccacagatcatggcaaacaaakgagtgaattcttagtggggacacagtcctgcatgtgataaacaacgaaatggctttataaataagtcaagaattgagtgaaacatagggtcaaatttacc

SEQ ID NO: 36964 - DNA, 201 bp, Bos taurus
tagtaactgcattcaagtctgaaactgctatttatttctgcctgctcttcctcattgcaagtttcctcctgtatttctgtgatatccttcatgtcagtttmttttcctgggaaattcacccatgggaattttttgagtcttgcatgaaagtgtaatcttccagagaggatttttatttgcctctatcaactataaaagcca

SEQ ID NO: 36965 - DNA, 201 bp, Bos taurus
tcatttgaagccatttactaccacaacagcagaaaactgtttgcatcatccacatgaaccagctttgctgctccaagtccagtgcacagttgccaagagcratgtgagtcattaggcttcaagcagatgctcagactcagaaggtgctgggcgttgctcgctgtgcgagcacagcgcgcccgcaacgtcgaggcaatcaga

SEQ ID NO: 36966 - DNA, 201 bp, Bos taurus
tagtgggttcccctagaatctagagaaaagtcaagtttcctggttaaatgggaaaaggggacaaaatataagccaagaggtagtgtgtaacctgctggtgygaaatacttgactgtccatattgaatgtccctgcagttaagggaaactaatttgtgtaatgcacattttcttggccccgtgagttaattagttggtaaat

SEQ ID NO: 36967 - DNA, 201 bp, Bos taurus
aggatgccacagattgtttccaaacgatttccaaagagtcagtaattacacctcaattacagtgtaattctgtaatgctgtaaatgtgaatgctgcagtgytgtgacataaaggataaaatagggtattattgatttgtttcccatggttttagtaggattgaatatctctatatagagcagtcagagtttccaagggagt

SEQ ID NO: 36968 - DNA, 201 bp, Bos taurus
cgagctcactgctgcccatgattgcgcgtgtccccggggacccggcccaccccacaagtgactgtgcatgtcctcggaacctagcccaccaccgtggatgmcggcacgtgtcccaggggccaagcccacggccgtgaccgcgtgtgtcccagggactggcccaccgccgtgggtgaccgcgcatgtcgtggggacccaacc

SEQ ID NO: 36969 - DNA, 201 bp, Bos taurus
gaaagcacgtggccctgtgtcaccgtgatcccacactgccagcctcaagagcttcagacggtgaatctgcgtgcctgatgcacgtggtgccctgtgggtcmgctggtagcagaacaagcgaggcccctgtgctcgtggaacttcaggtccagagaagaggcagatggtaattcttcactcagatatttaattacgagctgt

SEQ ID NO: 36970 - DNA, 201 bp, Bos taurus
ctagttttgaaaactaaattcttcatttaaaattgataaaaattcttaatttaaaaatggacttattatgctcagctcccagctggccaaccattcctgayatctggtttaaaggataagtgaaaagaagctccttgtaaatgccagccccgttccattaagcccgtcaccctcctgaggacactgagacaggcggtcccg

SEQ ID NO: 36971 - DNA, 201 bp, Bos taurus
gtcatttgtacaaggctggaagatctatcacatgataaaatgttcagatttctgcctgaaggcagtaggaagtcaggggggtctttaaggaggtaagtgamctgagggcttcttacgtgaaggcagttttatgtggtgtataagacaggctggtgtggggaaagagcaagaaggagaaagacgttcaaggacaacctccca

SEQ ID NO: 36972 - DNA, 201 bp, Bos taurus
attaaggttaagtgaggtcacaagggtggggccctgctctgatgggattagtgtccttgtaagaagagaccccatagagctcaagttttctctcctcaggracacaaggaagtcgtgtggccatgcacattaagatgacggcgtctgcaaacccagagagctctcgggacttgcctgggggcctagtgattaggcctctgc

SEQ ID NO: 36973 - DNA, 201 bp, Bos taurus
catacacccccagggagagaggcctctcctggttcacagaggttctttctgctcccatgctgcgtgcttgcagaccacagcagctgcagtgagcccggctycttcttggcctcgtagggttagtggctggggccgtgtggcagcacagtgggatgcttcagtggtgaattagccaaggaggccagatggctttactctgca

SEQ ID NO: 36974 - DNA, 201 bp, Bos taurus
actgctgtctccacttcagggccccagggcagcctcttctccccaggtctctatttctttgatttccctgaaaaacaagggatctggggccatagttcccrccttctttttccaactatccccatgtgtcctcaatggcaagaactgtttagtctgtgagatctgggaaatccatgttggcactagggctgctacttcagg

SEQ ID NO: 36975 - DNA, 201 bp, Bos taurus
cagtggcatgttcagaaaacagcaagcagcccagcacaggaggcgtgctggtgaggctgggactgggagggagaggatttgagagcagccagtggctgtgwagggcctcacatgtcatggtaaaatgtttgcaggaagtggtagaggagtccaggacaacttctggactttagtcctgtggcttgagtgactaaagtcagt

SEQ ID NO: 36976 - DNA, 201 bp, Bos taurus
tctagggttgccttagttaatattattcatgttctgtccaaattgaatagcaaatatttatttagtacttgatccttgccaagtactaaatgataggcccyggcaaatatcggtaaccaagttaatcaggaatctgcttttatgaagcttaacttgtagtaatggaattcatattcctgtctttttactaacaaaaatttt

SEQ ID NO: 36977 - DNA, 201 bp, Bos taurus
tctatggcatctttttcttccttgtccacaaattcttgtactgcttcacccattcccctttctgttagaagtgagagctgtacgttctgtaagagacagaraacagtattttctgatgcagaaaacagtattttccctacaaaacaattctatacaagtaaggaaaattacagaatcaaggaaaaagacaaaaaagttatc

SEQ ID NO: 36978 - DNA, 201 bp, Bos taurus
gtccaggctgctctcaaattactgattttgccctgcattcttgtgtgtgaggttttgtgtgcacccttgaagagtgacttttctattagcttcagtcatgyggagctcctgcaattaatccttactggccttcagaatcaaatgctctgggggcttgtccagattcccaagctgcagagcctggtgtggggctcagaactc

SEQ ID NO: 36979 - DNA, 201 bp, Bos taurus
gcaaggctgggaaagtttccaggcccctgtcagggctctgatttgcggagcgagcactctcttccaggttgccctatatcctgtcaggtgcagccgtggckgtggccgagtctgcggcgcgccccctcctcctggatgacctcctgggaactcagccttcctggattctcccaaggggctgttccaaagggagaggatggg

SEQ ID NO: 36980 - DNA, 201 bp, Bos taurus
tctacaccttagtatttccagttgaacttagaaggtcccttaggtttgacagcaatctttctttgtatcttttcttttttctgctagaaaatatcttagcmgttaaatgattgtactcttaaaatcatgatgaattgtttaagagaactcaatgtagactatttataacagatcttcctgtttataaaacacagatctatc

SEQ ID NO: 36981 - DNA, 201 bp, Bos taurus
ttgagaactatcctctcctcaacttctacatgcacttaaaaaataatttaaaaagcatgtcagttgcttcctgttaattttcctttgcacatgatagttcrcaacataaaaataggtttcacagtttagtattccattaaaatgcagccaccttccagatttcagcagcccattctctgggaaagcaaattttctttgtta

SEQ ID NO: 36982 - DNA, 201 bp, Bos taurus
cagggcattaaaacccacagatcaaaggggaggccccatcaatagccaagggagacttttgtccccaaaataccagttgaactccttatctaagagacacyggcatgggcctctggatcagcccacccaccaggaggaagacaccagaagcaaaaggaactgtggacctgcagtctgcagaaaggagaccacaaacacagt

SEQ ID NO: 36983 - DNA, 201 bp, Bos taurus
cagggaagccccagtcttgtcctagtcattgttaactctattccatacaggggacttccttgccagtgtgatacgcagtctcaggtctaccctattgtatygcattactactgttcattctgggcttccaaggtggctcagtggtaaagaacccacctgccattgcaaagtcacagaagacgtaagttagactccttggtc

SEQ ID NO: 36984 - DNA, 201 bp, Bos taurus
ttaaaggtctccctgcctctggttcccagatagattaaagtaagaattttcatttctcttttacagtctaagactcttgaagtaagtctgaaagtcacaayaagtttagtacaattcgctcaccatgcactctctgcagttcttgcagctctttctcaaccacggttcacacttgtgacttccttgtcacaacatgtttag

SEQ ID NO: 36985 - DNA, 201 bp, Bos taurus
agttcatgctcattctactctactgcttgaaaggaaaatcactggttaagcacttcttccattctgctctactgatgggatgttggccattatacctttaygcatgataagtatacttatacttcatggaaatagaagtaggtcttaagagattatagaaaattgattttgtgttaaaaggccacttcttaaagcaaacca

SEQ ID NO: 36986 - DNA, 201 bp, Bos taurus
gactggtaataagcccctgttcccctagatgatttgtcttagattcaggaaaagaggcttctcgggcctcctaaccataatatggccccagaggagcccakaagatctctccagagcactcaattcatttcagttcagtccctcagtcatgtccgacattttgcaaccccatgaattgcagcatgccaggcctccctgtcc

SEQ ID NO: 36987 - DNA, 201 bp, Bos taurus
tgcctctcttggcttggcccacttctcccttgaggtgttctttcagttctttcttcagtgaacttgcctttgccagggctaagacctcagatgctttgtgytcttatttagaactgaggcctatgagaaagggtgttcttcgactctctccatcccaggtaacagaaggataaaaaagtccaaaggagctgaggattggga

SEQ ID NO: 36988 - DNA, 201 bp, Bos taurus
acccaggcaatttgaaattccactcaactttcttcctgcggcctctctctaattctcatggggaggtgataatcagccttttactgtttgtgcctgtgatycaccatagacaggccttcatccatgagacatccctttaagcattgccttcaaataatatctgggcctatctattttctttttacttacccacttgcttgc

SEQ ID NO: 36989 - DNA, 201 bp, Bos taurus
gatttattcaaatggaggttcaggtatccaagatggagaagtgcacaatgcttctgaagacctgggctcagaatcgtacagtgtccctctgctacatcatkctggccaaaaccaagttacaaggccagtctggagtcagagcaaaagacatggatacaaagaagccaatgattgcagctatcaataaaattggtattgtat

SEQ ID NO: 36990 - DNA, 201 bp, Bos taurus
acagggtggaagtaagggagaggccagaatctaaagggcacatgaacccaaactgctcagcttctgaaggtgttaattttccactcctttcccaaaaagarctagttgattgtcttttattagtcaaaactattctaatacaaccaaaggggggaaaaatcattctcacttgttgataaagatataatattacaattaagc

SEQ ID NO: 36991 - DNA, 201 bp, Bos taurus
tgttacctgtgtccttcagggaataattaaagattctgtgactatataagactgacttgctatttaaattgttatctgttctcctggcccaactgctattrttttcttattgcatgttcacattatttcaatacttagctctttaggaggcttttgtgactcagaggaggcctggcagaccaagcatttcttcaaataaga

SEQ ID NO: 36992 - DNA, 201 bp, Bos taurus
gattagtttccaggtggtctttggccaatcattctaattcagagtccttcctggtggctcatgcatcgctcagccaagatggatgctagcaaaagggattyggggaagtggacagacatgcggtttctccttcgaaccgttccacactcttccggttggtggtggcttattagttctgtattccttatcaggatctcctgt

SEQ ID NO: 36993 - DNA, 201 bp, Bos taurus
ctgttgtacatcttaaagagacctgtgatcatttcctttcattccatctgctgaatgacatattcatgtgtttactgttgctgtttcctaagcacctccaytctatgctttactatttaaagttttgatttgccataagtataaagcatttcaacagttatgtgtaatgttatcttacagagcagttccaggtgttccccc

SEQ ID NO: 36994 - DNA, 201 bp, Bos taurus
tcctactgaaatgaaaaagatggtggatgtgtcccttgatacttatgaaagaactttttattatgtgttaaatttgtctcgggctcagttttgtctttgaygatagtgtaatgtatatttacttgcctcttccccacacaagatgggggctttctgtgaacaagagtgtacatgtatttttttttttttgtattgtgtgac

SEQ ID NO: 36995 - DNA, 201 bp, Bos taurus
gagtgattgaagatctagcaacttcaccttaatatgtttactgagggcctttaagtttgagaacatctcacctcaacacttacaatttgctttttgctacygcctctaaccttttatcagagaaggtgatggcaccccattccagtactcttgcctggaaaatcccatggacagaggagctgcagtccagggggtcgtgaa

SEQ ID NO: 36996 - DNA, 201 bp, Bos taurus
gcagggactttatggtccacacacaacaagcagcctatgagaagcccaggtgtataagacacggggctacaaaggaaaggcggccagtgtgactggagtgytgagagcatgaaagagaagcgatgtcactggagacaaaggtcgggtccggatgctgcagggccttgggccacattaacaaattttgatttcaagtgcaaa

SEQ ID NO: 36997 - DNA, 201 bp, Bos taurus
agtatcctggcctcccagaactctttatcactctatattcttgctttaaaaggggtgtctggagagcccttgccagcgcttgcagaatgaataaaggtaayccaaggaggccggtggttgaatttggtctctgtcaccaggaggaaaccaggttctgcagctggaaagaattaaaatgtaatagttggcagtgctttattg

SEQ ID NO: 36998 - DNA, 201 bp, Bos taurus
gtgagtgtgaaatgaaatccatattagggtaaaattccaaggtgaagaaaagatttaaaacattgcatcaaagttctcatttgggccctatccaaaatacrtgacttctttttcagaaagcctttatgtccgtcctaatgtacaacataaattgaagcacagtctctgtggaggcctggtaacctggcaagactcacagaa

SEQ ID NO: 36999 - DNA, 201 bp, Bos taurus
ctaaattatgggttcattttagtgtatgactgtcatctctgggttactcaaaatccatgtctatctgtctatccaacaaaccacttactccacgtcatttygaaaataatgtgggcgtaaatgttcaatcagatgaattaactcatcagtaaatttagaggaaaatcctccttacatagttggagacaaagatgagataag

SEQ ID NO: 37000 - DNA, 201 bp, Bos taurus
accaggagtcagtcaaatcgttcatttaataggcaatgagtgcttttagggatgcttcataatcttacaaattttcaggtgaaattttctgtaccataacracacctagatatttatgctgttctagtttagtggctctaatggtgggagtttcagtgatgtcaggctggtaagaaggaggtgtagcagtagcggaaagta

SEQ ID NO: 37001 - DNA, 201 bp, Bos taurus
tagggagagcaatctactttgcattctatcaagctaaatgataaactcaaccaaaaacattctcacagaaacacccagaattgaagaaatatctgggcaayttgcagcctagttaagttgacacaaaattaatcatcaaaatagtcaaaattagcttcaagttcgttaaagattgaaggggaaaagaagacacaaaagaac

SEQ ID NO: 37002 - DNA, 201 bp, Bos taurus
atgtggtctttaattctgtactttttaaccccaccttttcaaaatttgcatttaaacaagtgcggaggtctgtcgtttgacctctgccctctgaccttttycctctcccttagtttaatggtcgctgccttaagacttttgaaaagtatagtctttgttggagaagttgccaatctttgcatacagccttgcctctccttc

SEQ ID NO: 37003 - DNA, 201 bp, Bos taurus
tcttgcattggcagatgggttctttatcagtagggataccttggaaattctattctttgcagcaccaactactgtcaaatgagaatgcagacccagtgttktaatttctgaaaaatttcccctagaaaacctgaaatatcagatttttaatgtaaatcttgtataaatcttgaatcataaatattcacaactaaacccatc

SEQ ID NO: 37004 - DNA, 201 bp, Bos taurus
acagagacattgtttttacctctcactatcttattaggtcttaaatctctcaaaagcacggacagtgtatccatctttgtattcctgggatctggccagtrtctggatcatgttatcttattgctcaaagtgttataattcacaagcacaaggtttggaatgagaagatcaattaaaggccttatgcttctttaatatttt

SEQ ID NO: 37005 - DNA, 201 bp, Bos taurus
caacaatggccaccacagacccccccagagtccagctcaggaccgagtcccctctgcctcctaaggcatagtcttttcctaggtcctggtcacctcagatycagggccacactgtggcacggagcgtgtggggccagagatttgattggctcgggccggggtgtacaatgaagcagtcatgggaagcccagcagctgctcg

SEQ ID NO: 37006 - DNA, 201 bp, Bos taurus
tcatgaagagttggatacaattgaagccacgcagcagcagcagctccataacttggttacaggaatgattctgctgttctgtcaaactactaagaaaagargtaatttagtagcataaattcttcctggtttgggaagatcccctggaggagggcatggcaacccactccagtattctttcctgaagaacccccatggact

SEQ ID NO: 37007 - DNA, 201 bp, Bos taurus
atgtttttcttctgagttaggtgggaagggatcataggaaaataaccattgccatcaccattcataaaataggaaaatgtccttccttttgttagaagacmttattttccagctagagttggactggcctaaaataaggaagtctttttccagaagccaacccttatttgaccatatctaaaatccccatcctggaggaga

SEQ ID NO: 37008 - DNA, 201 bp, Bos taurus
tcggtatctgcatgtcccccgcgataagtgggggtggggtgctgaggctcaggctccgagggttggagcccaggcagaagaccgggattggctgtgtactrtctggaaatggcagtatggcacagatgagggggccaggaaaaagcctggccctgccaggaaggcaggagatgattgtcgctggaaccctctaactccaca

SEQ ID NO: 37009 - DNA, 201 bp, Bos taurus
gaagagccacatgtgactccctcactccctcagccagcctgggtttgctcctgccacacacaaggcctttgcacttgctggcccaccctcctggaccctcyctctgctgcatttggacagcatgctccgttatccctttacttactagctcgcaggccccttaccgtaagtcccaggactgctggggctgtgtcctgttcc

SEQ ID NO: 37010 - DNA, 201 bp, Bos taurus
ctccaggcctccccttcccgtggagagccagatgtgggacccaagtttgccgcgcttgccccgcagccaccctgccccttctgccacacagccctcacccsctctgctctggcctccgactcttcctggctctacctgagccgaccgttccctctacctgaaatgttcctccccctccacgcagaagagactcactccgtc

SEQ ID NO: 37011 - DNA, 201 bp, Bos taurus
ggcttaggcagccccagctcactcctcagtagctggcagacagtcctcaggaacagaacaggagatgaaaactcaacagcatttcccccaaggcccgggtmctatgttccaagaggatctaccagaagatgcctttaaatggtaaacacctctatggtacctcagggccccaagaatttgctcagcctctcctagacacct

SEQ ID NO: 37012 - DNA, 201 bp, Bos taurus
attagatcaataaggtggggttaatatgatggccaacatcatctcaacaacacctgagataacatggctagaagctaaagttctctaaggaaatcctgaaragtcaaggggcctgtgagtacttatggagaagcaaggtttttgaatctcatcctgaaaaaaataatgaattggggcagatgggaaaggaaggaaggagat

SEQ ID NO: 37013 - DNA, 201 bp, Bos taurus
ggcaggcagaatgagcgatttcccctctctgaccatagcttcctgacacagttcccacttcccagttcttagtgcttcaagtacccaacccttcataattyactcaggggctaagttttagggcccatggttaatttttcctaatgagcactctattgtcatgtactttatgatacccagaaaggtctctattgtttttaa

SEQ ID NO: 37014 - DNA, 201 bp, Bos taurus
agattccatatatatgcaataatataaatttttttttccctctaacttcactctgtataacaggctctagattcacccacctcatgaactgactcaatttycccccccaaactccttaaatgctggccagaaactgaaactatcaatatattttagccaaatacactggaaaagtaatgttggactgacaaccatctggag

SEQ ID NO: 37015 - DNA, 201 bp, Bos taurus
ctacacacatgtgaaataagctctgttaatctgaactccctccttatgaaaaacaaaacaaaacaaaacacattaaacccttggcactgggcctggttcaraatgttattttttaaatctgtggtgaatgctgaaaatgagagttctctagtaaacattgggtaacatggaggccccctttccaggggcagcaggccctat

SEQ ID NO: 37016 - DNA, 201 bp, Bos taurus
aaagaaatttggctttcttttaacctctgttgacaaatctattaattattgacttagttaaattttcttccctgttttaccttgttaaaagcatcaaggarcagccaacacaggaaatttttactctttccaaatacttcccttgaagctttaggcctagtaagctctcatcctgccttccaatttatcacaggcaactga

SEQ ID NO: 37017 - DNA, 201 bp, Bos taurus
gacctttgggacaacatcaagtgtaataacttttgcattatagggatcccagatggagaatagagaaagaatgggataaaggtcatattggaaaacatacragctgacaatttcctgaaatttagaaaattaaaatacatccaggtacaaaaatcatacaaaatcccaagtaggaccaacccaacgaggaatacacccaga

SEQ ID NO: 37018 - DNA, 201 bp, Bos taurus
aatcttatttccgaatcaaaatgaactggccagcaatacagtaaaaactgcaaactctaatctaagttggagtctctcctctgcgcttgctcagcactgcytggggcctgaagcctgtagggaagaaagaacaaggtcacctccttctcaccctgctcactctcgggagaaccattagagctacttttgaccttttcaggg

SEQ ID NO: 37019 - DNA, 201 bp, Bos taurus
gggtagtatacccatttagaacaaatgggtaagagtaaactggttgtgattatatttggacttaccaaacacattattaagaaactactattaaacatttycacagataataccgtacttaattttcgaaaaagtcagtttttcctactgtacagattttaaaacaagaagctcctaaagtaagcatgatgtacctgaggt

SEQ ID NO: 37020 - DNA, 201 bp, Bos taurus
gtccaccctctgtagcagttcatgctcgtatttgaaacctaaacaaaagcctgcaattgtaagtggttttgacttggccttgtcttaagtatttaaatacwttctccttcagatgtaataaggatttttcaccttcttcttataaatggcctgtgtgccaaaccatagccatgaactgagcatacgtacttggattcaaag

SEQ ID NO: 37021 - DNA, 201 bp, Bos taurus
ttctgcccctcctgaattctcttggttggtcttggccgcagcagcatgctctttatcaggaacatctgttgtaagacagctcatgcaggtggttatcatcrtgcctggccagcatgggtggttttggttaatagttccctaataactagatactctattctttgattctttatggaataaaaatccaatagaactcaacat

SEQ ID NO: 37022 - DNA, 201 bp, Bos taurus
aaataaaaataaaccaactaagaaaataataataaaatgtaaagatatgcatgccttaaaaaaaaaaagacaacagtcattgtatttagggcccatcctaratccaggatgacttcatctcaggattcttaattacagcagcaaagacctttttacaaaataaagcacctcacttgttccaggatatagttcttttgggag

SEQ ID NO: 37023 - DNA, 201 bp, Bos taurus
tcttttccacaacctcttactatgggaatgcttgagggctcaattttcatactcctgttttctttgttttatgcttatatccttggagagtgcatgcagtmttatggcattaaatgcaacttatatgccaataatttcctaatttatatcttcattctaaacctcactcttaaactctagtctcatacatctaggtgtcct

SEQ ID NO: 37024 - DNA, 201 bp, Bos taurus
acttctaataaaaatcagcttccttaactttcaaatgtacataatgtatggctttaaactcattttcactgacagttaaagatagaagctgtctttcttgktttccccaacaactcccctcaatctgaaaacaaagcatgacaaggtttctcaattaacttcctttgactactcttacaaacacaacacagtgagcaatgg

SEQ ID NO: 37025 - DNA, 201 bp, Bos taurus
ccagagcaggacccccctagccgagccctctaagacctgaatgcgtggagcaacagagaagttctagccaaagagcccttctgataactagctgtcagacrctagaaaaagactctgatagggccatagctcctggggctgaggccatccgtgtccctgcacacttggtgctgccaggctccccatgacccaagcagctgt

SEQ ID NO: 37026 - DNA, 201 bp, Bos taurus
gccccattgtttttcaaacctcagctttctgggaattggtgtttctgttgctgaatttcttggctgagaaattcagcttacatttgtggctaggacccctmacttaatgaggagaaactctgtggttgtgatgttcctcctgtttgtgctcgtgtgtatgggtcttgtctaggctgcctttttgtccctctgacccactga

SEQ ID NO: 37027 - DNA, 201 bp, Bos taurus
ctgagggttggaggatccaatttgtggcttcaactactcactccctaggtaggctcttcatctatttattcgtccttttcctctgaaatcccttccagggmcataggttgtcacttggtcacttacctttccttcctatctgattccacatggatctttctttcatccttagttgtttgggagtctttctgccagtttcca

SEQ ID NO: 37028 - DNA, 201 bp, Bos taurus
ttttagcttaactttatctgtgcaatccttttctatgcccaaacatggatagttgactttttctagcagagctgattaagcagttctaaaaatctctctgyattttagcttgcagctatatttaatcaaatttaataaagcaaagaatgcctgcttaaaaactgcacatatttcatcattcataattgtattgctaattat

SEQ ID NO: 37029 - DNA, 201 bp, Bos taurus
tatgtgtcctgtttgattttaacctgggctatcatttcatatcatagaaaaataaaacaagatccactgtaacattcagaaaataaaaaatcaaacattaktagagggtaatatattgaaaacaaaatgagttccaagttctgacagctcaagtaaaacccaggatccataaatgaaactaaggcaataaaaggatcttta

SEQ ID NO: 37030 - DNA, 201 bp, Bos taurus
catttccttttccagggtatcttcctgacccagggatcgaacctgtgtctcttatgtcttttgcaatggcaggcaggttctttaccagctgagtcagcagmgaagccgaaatatagacagatgctagactataatgaaggacaaattactcttcaggcaagtagaagttttccctattgggaaaataactctacatagcaa

SEQ ID NO: 37031 - DNA, 201 bp, Bos taurus
gtttatttcaaatatatttttctctagaaaggtaccatgcatctctgtagtgggactgcccatgctacaacatagctaccttgtggaatgccacctgttgygcatggcaactcaggaagaattcaacaatatttcacaacttacgttagggagagattttaatgtgtgatagacataattacaagtcctagatcagcaaga

SEQ ID NO: 37032 - DNA, 201 bp, Bos taurus
catacacacaatatgtaatattaactatggaatttattcttctgagaagttagtacccaaaagtcttgtggagagaaaagtggttacagtatggtgaacartaacaagtttttagtcaggcatgctaaactgaaataaaatctaatatcaaaatttcaggatgtactgatagtaaatgttattttagggcgtagtatacaa

SEQ ID NO: 37033 - DNA, 201 bp, Bos taurus
gtgctataaaaaatatagcacaatttatataatttaattcttaagaaaatattgagctgaagggtatgaatgtattagtgaaagagccagactagtttggraaaacatttccgtggagttttgtgcttttcaattgaagcactaaaactaaattttagtcttgttgacaacaccatggctttaactacactcattctttct

SEQ ID NO: 37034 - DNA, 201 bp, Bos taurus
ccataaaattgtgaagtatactgtgtttacacaaaagcactggaataaattaatcattgtttataactaacaatttcctagaaagtgaatacattttctaygagactgagtgatgatttttcctaattcttttttacatcttccactaaataccctacattagaggaaatttactgcaaactcttacaaccagaactcaat

SEQ ID NO: 37035 - DNA, 201 bp, Bos taurus
ttaaatatatgtacaaaaaaaaataaagttaagctctaagtgcaaatagcatagaattactatttcccaaagtgttcctgattaactccagaaatatttayaaagtgcttacacaaaatgccttgctttcatgaaactacaccctagtggagaacacagaaagtaactgtaaaattgtaaaaacacgaacataattaaaag

SEQ ID NO: 37036 - DNA, 201 bp, Bos taurus
attatacagtcaggttagtttatgttcagctctaagacattaatttagttgaatgtactaaattcaaaatgtactaatactaaagaatgcttaaacaagcmggtagaatctaggaacattttttaagaaatactgtatctaaatgataacttcagtgtgtaggcaataaccattgctttgatatacttaatataaattcaa

SEQ ID NO: 37037 - DNA, 201 bp, Bos taurus
agccagctttcaaaaaccaaaatgaaaggtcaaacaatccaataaaaatgggcatgacagtcgagaatgcatttttccaaagagaatatcaaataaaccartaagtatatgcaatgattctgtctctttagttttagaaaaattaaagagtaagacaacgccaccaccaaaagcacaatgtgacatcacaacatatagcac

SEQ ID NO: 37038 - DNA, 201 bp, Bos taurus
ccccatggactgcagcatgccaggcctccctgtccctcaccatctcctagagtttgcccaagttcatgtcctttgcatcagtgatgccatctagccatctyatattctgtggcctcttctccttctgcctattatatttctatatgtaatagtattgaaagtaacaccatgcttagaaatcgtctttaaaaaagaattgca

SEQ ID NO: 37039 - DNA, 201 bp, Bos taurus
ctcttccaagatcttcctgttttgggtcatcttctttcctttgaaattgtataaatttcagccaccattttggataatggagtctgagcaagcaatggccrccaatcaataatagctttctgtccttcatgttattgtgggactacagactagattgtcttccctggtggctcagtggtaaagaatccacctgccaatgca

SEQ ID NO: 37040 - DNA, 201 bp, Bos taurus
gagatgtttagatagcatcaccaactcagtggatatgaatttgtgcaaactctgggaaataatggaagacagagaagtgtggcatgctacaatccatgggktctcaaacagtataatatgattcttgacagaacaacaacaattattcagccataaaaaaaaaaaaattgccacttgtaacaatatgaatagatctggagg

SEQ ID NO: 37041 - DNA, 201 bp, Bos taurus
gtttgggccagttcaattacctcaattattcatagttctatttctgtgatcacgttttgagaagtgtgataccaacatgtcaccacagattcatgccccaygaaaacatgcaaatgggattttgaaaaatgcaaataaggatccataacccatgcccatccataaaggaagcttgattgtgtctctttaggcaacattttt

SEQ ID NO: 37042 - DNA, 201 bp, Bos taurus
aaatatattatttaacttttttcaagttctcagatgttaacatattttatcttgatttttactgggatgatagaaaaactttgcaataaagtttaatattyaattcagttcatttattttcccatgtgataatctgtgttaattttttcccttaattctgaaactataaatcctatgtcctaagaatactagaaattgaaa

SEQ ID NO: 37043 - DNA, 201 bp, Bos taurus
tatttttgatagattttaaaacatgtcttcaatcttgactgtaactgatcattcaaaagtagggaagctgtttgaatttaaagtctctgatttgattaatmcaagagtgcccaggcatatgttaagccatttataacttataaattaaaattaccaattctacacaagatattaacagctacttctaattatactgaaata

SEQ ID NO: 37044 - DNA, 201 bp, Bos taurus
tcattcccaacatatacatcataaaagttaaagagacactccacttcatttttcagatttataataattagataaaggctaaaattgggaatataaaaatkatcaacattcctacacaagagaaatatataacccattgcttttattgagaatatggaactaagggaccttgtaaactgagttcaaggtactgtacttaag

SEQ ID NO: 37045 - DNA, 201 bp, Bos taurus
cccattttaatcctactgctgtttattcttttactaatctgccatttttatatccataatctttttatgcttctttcaccccctatgaatctattatccakaaatcaagagacataaatacaaagaattttgctactttgcatgtgttgaagtttcattcaatagcattctcattttggggaagaaaaaccctgcttttcc

SEQ ID NO: 37046 - DNA, 201 bp, Bos taurus
agaggacaggttgacaccatggcctgtttttccccagctgatttcctctgtgggaggtagcgttaagatatgagatggcagaggaaggagggaaggcccgyagtattgctgccacccctatcaccatccctacctcacaccagcctctcctgaggctgcatttaaaattttggccatgagttttccatggtttccactcta

SEQ ID NO: 37047 - DNA, 201 bp, Bos taurus
tgggaattaagtatcacagcagttttcactcaaagtccatttctagacagcaacaagaatgcctacattttggctaagcagcttgtgtggccaacttatayagaagtagcaaaatcatttttagtaaaaaaaaaaaagaatcagttcttggcagttgacatattggaagatataaattcaggcactggattcttgaatcta

SEQ ID NO: 37048 - DNA, 201 bp, Bos taurus
atgctgtctgggacgggtttacatttctctgaaatgggttgactagtacccttcttcagaacaagatcaattaatatctcttccactcctgggactccagkatgcctcatctagaacttgactagagtcagagattgactccttgcctcttcaagaataaaggctcggtttccattcagttgcccagggagtatggtgggt

SEQ ID NO: 37049 - DNA, 201 bp, Bos taurus
tgagataaaacataaaaagtgctaagcctagagcctagacatagttggaactccattaagtgttggccattagtattattacatgctttcttgagctatcyattgccacttttttggcatatggttaatgcactcatcagcatttgcataaatggtgttttaaaaatatgtgtgataagcatcctttgtatttgcatagca

SEQ ID NO: 37050 - DNA, 201 bp, Bos taurus
ttaagttgaatttttgaaaacttgattctatgctaatgtcaccgcagatgtttgctacttaagtgaccctaacaataaatgttttgggggaaaaaaaaaamcacagctctactcacaaaccttttcagagcatattgttaaaatcgggggcatctacagggagtgatttttaaagagtctgaagtgtttccatagcatttc

SEQ ID NO: 37051 - DNA, 201 bp, Bos taurus
actatttttagaacatgtgtaacatgtcaggcaccataccagatgcttttacatgtatcatctcatttaattctcacattccgatgtgtatgtgtgtggtyatgtaggaagcagagggttatgtaggaagcagagggaagagtggctacattttataggagttcaaagctgttagatgactgctctaaattcactaagaaa

SEQ ID NO: 37052 - DNA, 201 bp, Bos taurus
ctacctttaaaaattgtgaatcaccatgttgtatacctgtaacttaactgtacagtacagcaagtacatgtcacttaaaaaatgaaaaggttgtatgcttrtattcacaaaagaactctaaagaaatactgtaagatgattgagaaaaagatgtggtatacacacatacatacgtacacaatggaatattatacacctgct

SEQ ID NO: 37053 - DNA, 201 bp, Bos taurus
gactctgctaccacagcctccttcccaggccagggaactgggctattccagttccttttctccaattagacttccaaaggaagtcacttcatctgggcctmaagtttttatctacagttgctacctggatttaaaatcccaacttctccccacagttcagtcgctcagtcatgtctgactcttcgcgaccccatgaatcgc

SEQ ID NO: 37054 - DNA, 201 bp, Bos taurus
gcgattcatggggtcgcaaagagtcggacacgactgagcaactgatctgatctgatctgactgtattttgcaatttaaaattttctgtttggttcttttaygtatcttttatttctttactgacattttctatttcttcatttgtttcaagcacgttcataaccgctcactgaagcatttttaggatatcttctttagcat

SEQ ID NO: 37055 - DNA, 201 bp, Bos taurus
tgatccctttgcagcataacagattggtctcacgtgggagatggccaccaggtaatggagtccttgcttcatgggagagactagaaaaaggcaggtctgtygaatctaaaacatttggcaaactgaagtctagagataatgtgaaaagaagagagaattcaagtgaatgtacaagagaggacagaaaagcaggagtaagaa

SEQ ID NO: 37056 - DNA, 201 bp, Bos taurus
ttggtatataaggtagacagtatcacaaacagatggatagtatcaaccaagaagtggaaatcataggaaagactcaaatggaaatgctaacaatgataaaratggtaacagacgtgaagactgcctttgatgggctcatcagtctaatgaccttgaagacaggtctttagaaattaccaaactgaagcacaaagggaaaag

SEQ ID NO: 37057 - DNA, 201 bp, Bos taurus
gttacaacactgggcccagatcctccatgccttcccatttcacttaaagtgcgagttaatgtccttacaacacccttcagggcctgttaagccctgggccmtggagccctctgatttcacttcctaccaccagaacctggcaccccagctttgaccataggactccagtcactctagtctcctggctgtttctcaagtgct

SEQ ID NO: 37058 - DNA, 201 bp, Bos taurus
acagtgaggcagcgcaccagccccctgggccaggagcatggctcgacttcattattggatcacacaaccaactttggggcccttttctcatcacaggtccygtgggcagcagagcccaccagccacccagcattcctgggctgggttcccacccaaaccctgaagtcagccagggccaatatttggacccaattatgtatt

SEQ ID NO: 37059 - DNA, 201 bp, Bos taurus
acactacaaagatttcgacttttctctgagtaagacatgaagttaccagatagttttgaacagaagacagatctggtgcgacttctttttagaagcagtgrtcagtagtctggccactgcacagaatggacaggtaaaggttgagtgacctgcagaggaaactgtaagatgcagtgtccaggctggagatattggttgcct

SEQ ID NO: 37060 - DNA, 201 bp, Bos taurus
gactgcagcccaccaggcccctctctccatgggattttccaggcaagagtaccagagtgggttgccagtgccttctccatattttcctcctactgaatccrtattccagaggccgcctccctgggagccccttcttttgtggcacttgggctgagccctcacctgcctccaggcccagcggacagcccagctcctatgcac

SEQ ID NO: 37061 - DNA, 201 bp, Bos taurus
aatctttgtatccatagtcatcaaaggtattttctgttttggcagtgtctttgtctggttttgatgatcagggtgatggtggctttatggaatgaatttargaatgtttcttcctcttcaatctttttgaagtgtttgagaaggatcactgtaagctcttatttgtgtatctggcagaatttcccagtgaaaccatctggt

SEQ ID NO: 37062 - DNA, 201 bp, Bos taurus
tcagccattttgggagcttattttaccatgaggatgctggtgctgtcaagtgccattctggaatccttcctctggattattagcactgggaactggccttrcctgctagtctaccagtgccagtactaccctcagcctaagtgcctaccttggcaggaacacacgcccacccaccagcaggccagctgccttaaggcctcc

SEQ ID NO: 37063 - DNA, 201 bp, Bos taurus
atcttcattcccctggcctgtacctaggaacccaatcagagcctcaaagcatttggggttgactggctggagtgaaatggactgtcatcagtggagcatcytccctggaactcctggccagaggtatcccatgggcctactaggaccagacctcagaccttctgatcttaccacaatcttgccatagtcactagctgaagc

SEQ ID NO: 37064 - DNA, 201 bp, Bos taurus
gggccctctcagctgaaagaggccctgagggagcaaatcttaagctcaggacccacatagccataagggtccccagaaggtagattcaggcccaggtcccwagaagactcgctggggccaagtgggcagtgaagacactggccatgttcccctccagtctctgatcccctgaaggtttctcaccatccccactgattccca

SEQ ID NO: 37065 - DNA, 201 bp, Bos taurus
aacaagtcatttcacttaagtatctagggtaaaagttctctttatatgaattggtaatattgatttccatcattgtcattaattacttcaatatttggatmtatttacattttacactgtattttttaactacgcctttttattctcttttcctatttctttatattgatctgtttctttaatccttcttttctcttttac

SEQ ID NO: 37066 - DNA, 201 bp, Bos taurus
aacaacaatcaacaaagaagatattctacatccaaagataagaagaatccacaatgagacagcaggaagagtgcatctgcaacacaatcaaattccattcygactgaatgggcaacccacaaactggaaaatacatcacagagtttctcccacaggactgagagttctgagccccagatcaggctccccagtctgcaagcc

SEQ ID NO: 37067 - DNA, 201 bp, Bos taurus
caactagaggcaagttttccccttctttataacttatcgttaaaaactatataatcaccttttagggtgttggaggaatatttaggccccattttttataygtctgtaggaatggagagaatttctataagagtgaaagtaataggaagacctgtttttctccatttctttacttccaactctccacagagaaggcacacc

SEQ ID NO: 37068 - DNA, 201 bp, Bos taurus
tgataaggattttgcatctgcaaagcacatttcttatcagccccatcttggcgctcctgctctccactgcagaaccaggccacaggaacgcatctcacacyacaagcagcttacctaattacattaaactgtatttcatcggttgtggagcccacgagccacccagcatcgtcagcacaggcagcgggagcaggagtacct

SEQ ID NO: 37069 - DNA, 201 bp, Bos taurus
agtgtatcaggttgtcatgtatatcccttgaggaggaaccaggaccctgcctcatggctgcactagttttcttgactgtctttcctttgtttctgttatcycttaaacgccttactcccctaactcataactgtttgaatctgcctttggaactcaaggaagctctgagaggctgaaacattcctacaaacaagaaacagg

SEQ ID NO: 37070 - DNA, 201 bp, Bos taurus
gttagcacatattactcaagtaccttatatatcacaccagctgttctgttctggcatgtattcatcactggggaaagttttaacctttgatggtgtacttmgcatactagtaagaagtgattccatttcaaaacctcattttagttgctcttctattgaaaacctcctggtagcaactatcacaggatgtatgactgtgaa

SEQ ID NO: 37071 - DNA, 201 bp, Bos taurus
tggtggtgtttcttgcttaaagaacactcacaaacagatgagtcacttcccagagggttaatgagtctctcccaaggcctcagtgttacaggagaagcatmtgtattggataccaagcatttatctctttcatctcttccagttgaggcataaagcacttctgaaggacatgacacagccctcttgatgaggactggaagt

SEQ ID NO: 37072 - DNA, 201 bp, Bos taurus
taggttctagcctaatgggtgatcttggccaaatattcaactctcttggctttgtttttctcgcctgtgaaagaagattcaacgacactgtaggtttttaycaagcaggcctgcacagttcctttcacggctgaaggcatactcctttgtggagtgattttgttcctcctctgccttcttgaatctgggctggccttatgc

SEQ ID NO: 37073 - DNA, 201 bp, Bos taurus
ctctcttgaaattactttagtggcaatgaatacagatacatgtaaactaaaaccacattgttttaaataagagaaggtattcacaagtaaattcacactgyactagaattttgacagtagtaattgcttctgctgtgcgtaatgatagcaccaatacaatctccctgtattgttcagttttgctatatcttggtttctttg

SEQ ID NO: 37074 - DNA, 201 bp, Bos taurus
attatgttgtggggggaaaatgagaaaataaagaagaaaatacatatgaacagatagaattctgtgttacctagtaagtgttcagtaaatgttacttattrttaattttcctaagcttctgtagatgctgaccctgggcaaaccagatgcaaataagtcaggatccatacgtctgcacctctggggtctcttgtgccaccg

SEQ ID NO: 37075 - DNA, 201 bp, Bos taurus
gcaaaaggttgaataagatactcctttaaaaaactcaccatttggctaaatttagggtggtgaacaccaacaggccaagaatattctttggccttgggccyatagcattttcatttgactgggaattggatgtatttttatttcctcttgactcttatcacctttgtctttagaggcacaagactaggtactgataattgg

SEQ ID NO: 37076 - DNA, 201 bp, Bos taurus
tttgtctgttcaagcaccaatgccataatgattctattactataactttacaataacttctggcattttcatacagtgtgttttcctcgtcctttctcagractgttttggacttttgtttcttgtatgttttagatttggattattagcatccactggagatggtgactgcagccatgaaattaaaagacgcttgctcct

SEQ ID NO: 37077 - DNA, 201 bp, Bos taurus
ccataggtcaaattcgtgtgtaaaaatagtcttcttataacttaccaggggcctagtacacagggtggaaggaggaagattttcctgggcaaaagggaggygggagagtgcagagtgcatgaaggccacctgaataagcactaacatagtatgcatgggaaccttggaacaggctagaaaagagtccttaatggggagctt

SEQ ID NO: 37078 - DNA, 201 bp, Bos taurus
agcatgtgccacgtgggctttagatccaggtggcaatgcacactgggaagctgcagagattaaactactgttgcccctgactccgagaggccatatcactytatggttttagatggtagtgttttagactctagggaaaacccattcaaaatggaggttgggccaaatttctttgtcttattgaatatgcttttttcctct

SEQ ID NO: 37079 - DNA, 201 bp, Bos taurus
gaagggcctgcaaaataacaactgtccatcaagacagagggaaaggaagatgaaggagttccagagcaaatgtcagactggacactgggtaggtcaggagyagtgtctggaaagtcagggcctgaacctcagggcaaaggcttaaggtaaccataggcagggatgctctaagctgagagtccacatgctagtcagagggtg

SEQ ID NO: 37080 - DNA, 201 bp, Bos taurus
ttccatcacctccactagctttgttcatagtgatgctttctaaggcccacttgacttcacattccaggatgtctggctctaggtcagtgatcacaccatcrtgattatctaggtacttaaaaggccaggaacacaagatggtgtccattattccaataaatgcccttagcttctctatgacatgaactaaaataatcttag

SEQ ID NO: 37081 - DNA, 201 bp, Bos taurus
ggaaatgaaccttccacacaaatggaacagcaagttcaaaggcctgaggtggtaatatatttggtgagttcaaagagttcaaggaaatatatttggctgaygtgttggagggggcaggcctgtaggcgacaaagttggggtggcaggaaggagccccattactgtgaaagacttgatgagaactttggatttcattctgat

SEQ ID NO: 37082 - DNA, 201 bp, Bos taurus
gaaacaccataatcaaccatgctaggcacttgccccaagtcctgtcattgaggaagttaaaactgaaaaatacccaacatgaggagagttggggcaaaggwattaacaaacaagtgagccaaacactacagcagaggagctgctggctccttaagtaagcctagagtcactagaacttgcctttttttgcaactggaaaga

SEQ ID NO: 37083 - DNA, 201 bp, Bos taurus
tgacaaaaaggtgcagttaattcttcaaaaagctaaaaaaataaaaaaaacttctcaataattttgcaaattggtcattcagcaaataggcctctttccayagtagggcagatactttgataagtataccatgaagtgtatcagttcagttcagttgctcagtcgtggccaactctttgcgaccccatgggctgcagcacg

SEQ ID NO: 37084 - DNA, 201 bp, Bos taurus
attcttcacgccccaaatatccagttccaccgtggggttcaggataggttctgggtcctggctgaaggacgttcaggaaacatcagggtcctaattctgarggaatggtattctgctcagggcaagaagaatgctgttcttttgtaagaaacccacatcattcctagaaggaagggactatgaaaataacaccgttctctt

SEQ ID NO: 37085 - DNA, 201 bp, Bos taurus
gagaaatgtctatttagttctttggcccattttttgattgggtcattttgtctgctgcttttggatgaaatattctataatatcaattaagtccatcttgyctaatgtgtcattgaaggcctgtgcttccttattcttctgaatgatctgaccactgatgaaggtggggtgttagagtcctcccactattttgtgttactg

SEQ ID NO: 37086 - DNA, 201 bp, Bos taurus
actgcagcatctgcagtgattttggagccccaaacaggttaggttgtttatttgagattttacttgtttcctgaggaaggcctgtactgatgtcaactccmcatacaaccctgtgtgttagttactcagttgtgtgtgactctttgcaaccccacggactgtggcccgacaggcttctctgtccatgggattctccaggca

SEQ ID NO: 37087 - DNA, 201 bp, Bos taurus
acggaaatggcacaaatataaagtgaaaatgtatcaatatctagcaaaattatatacagccatcccatttctgaaaagtacaagtttatcactggagtatyatttatagcaaaagactgagaacaaagtaatcatacatttgtcagtaagggactgtctgaataaactatggaacatgtaagcaatggattaccaggaaga

SEQ ID NO: 37088 - DNA, 201 bp, Bos taurus
gggtgatctgaacagttcagtgagcaatgaactatttcttgtcttccctacacacctgaaccactaacttgtggagacataccccaaagacggtggccctkcaaggcaaaaaggaaattatttctacccctgccccttgcatctacatcctattatcacaaggtttcgaccactggacgagctaaagcttcccattatcgt

SEQ ID NO: 37089 - DNA, 201 bp, Bos taurus
tgaattattttcttctaatattaataactaatttatgggtagtgtggttaaagtaattttaaactttgttttctggattgctggatcctttttaattagcrtgtgttatttttacaaaagcaatagagcggtttttctataaaacaaacaaaaaagctaatttgctaagatgttaacagtaattgattctgggtgcagata

SEQ ID NO: 37090 - DNA, 201 bp, Bos taurus
aacaaggtctccaaattggctgccaccagtatatctgtccccaaggggtgttccagttgcctcttgcctctccaagagactatccaagatctgcaagaggrctgaccatggttcctttcaaatgatcatctctgcactgggttggaacatgagattttgcatatacccttcaagtgcaaagtctctgtttcctacagtcct

SEQ ID NO: 37091 - DNA, 201 bp, Bos taurus
taaaaagctgaaaatcagttttgagcctttttaaagagcaactgtttctaaaatctaaaatatgctgcaaatatgaaaagatgtcttctttcccatccatygtctttctcaagatgattttatatgctgccaaaagcaagaagacaagtatctcttaaatgcattacagacaaattgcctactgctatttaatgaaaagga

SEQ ID NO: 37092 - DNA, 201 bp, Bos taurus
tccacctttggattcctgagctccatggaagaagtacaacggccctgagcttgccatgttgtgaggaagtccagaacacatggaaaagctttttgtaggtrctctggctgacagtctcagacgaggttccagccaatggacgtgtgacatcatcacagacaccaaccaccgaccatataagagtggagatgcttccagatg

SEQ ID NO: 37093 - DNA, 201 bp, Bos taurus
ctccatcttctgggatattctgaggaaattacagtcacccaagaaatggaagtgggtagcaagtgtcaattagcttctgtcccgcgtgtccccacacttcyagagatgctctggggaaggtagcaaggatgtgagggcccaaggtgggtgctgtcagctggagcgtgtgtgaaactggctgaagtctgcagagtggttgcc

SEQ ID NO: 37094 - DNA, 201 bp, Bos taurus
ccatgaaaggtcacgacagaagcagacaggagggaatgtaaacacctaactctcatgaacgggtctgagaccaccagtcatttcactgcttcagggggccmtgtatctagggacggtctcggtagggcttctggttggaatggggcaacctctgtggtggttgggagacagccggccatttcctcttggtccccctcactg

SEQ ID NO: 37095 - DNA, 201 bp, Bos taurus
cggccaccgcccctggtaggcctgacctaatcaggaagtggattctgctctacccagttagctcagaagataagatggcagcctcagctgacaccttgtgrgaccctgagtagaaggcccagttaaattgtgtccagattcctaagccacagaaactgtaaaatgataagatgttgagctgttaaactagtggtgattttt

SEQ ID NO: 37096 - DNA, 201 bp, Bos taurus
catgcctttctctttcccgcctgcctctgtctttgctcatgccaagtctaatatacaagacccttctccctcctcctaacctatccacgtcagtctgaatygagcttaagtcccaccccttcccacaaagttttcatcaacaaaccaaaacacactcttccccctcccttaatccctcacaagtgaatgtctatttctctc

SEQ ID NO: 37097 - DNA, 201 bp, Bos taurus
ttctagacaatgacaccactggcattagaaagtcagtgcctcttacctcccgccagtgtcacagtatatcagaagcaggcaggcccagccaggtaccatayggcagctcccaggctggggtgagaaagttgacatcccttgagaatttactcaaaatgcgtgtgccctgacagagcatgttctctgagacatcacagggac

SEQ ID NO: 37098 - DNA, 201 bp, Bos taurus
acacctggccaggtggggaaacagtcccacctactgtcaggcataatgcccaaagacgagcccacagccaccccagaatactacactgtccaccagagggygcagcacctggccccacacaccagggcaccagcactaatcccaggacccccagggccctgcaagcagagacctaggacccagctctgcctaccagtgttc

SEQ ID NO: 37099 - DNA, 201 bp, Bos taurus
tggtgatggaaaacttaggccacagtacttaaacaataagaagccattgtagggttttaatttgggagaggataataacagatttatttgaaaaaattcargagaataggttgaaagtggccagaagtaaggaaaccagagtgaaggctagtgcaatcattcagttgggaggttatgatagcttggattaggaaaaagtag

SEQ ID NO: 37100 - DNA, 201 bp, Bos taurus
aatatcaggccaaatatgttgctacaaagatattttaagattagattaacatttaaatcagtagattctgagtaaagcagactacccttcataatgtggaygggcctcacccaattagttgatgaccttaataaaaaaacaagtattctctcaccccctcctccccaccaggaagagagaattctgtctccagactgcctg

SEQ ID NO: 37101 - DNA, 201 bp, Bos taurus
ggattaagttactgtctgtacatctacctctgaacagcgccacagagcgagaaaaagacaggagcccgaacaggaagagtgttcctaacgccagccaattygacgtcacggtataatgctccaggcggtatcgctgaaacacgaagtggtaacatttctagaaagaaagaaaactgctctgaaaaaaagatacaccttgca

SEQ ID NO: 37102 - DNA, 201 bp, Bos taurus
tgtttccctgtcattactcatgatcaaagtattgcacacctctgaaggtcaccaatcacattatagtctcagtgactgagccacaggtgtcttttgagccmaacaaccaatatttaaatttttaaaattttatttggccgcatcaggtcttagttgcagcactcaggatcttcactatgtcacgcaggatccttctttgta

SEQ ID NO: 37103 - DNA, 201 bp, Bos taurus
ctgggaggggaaaggggtatgtcatccaaacagcccggagggcactgtctgagctggtgattagagacacaaaaacaagggtctccagactgtctggcctrttttgggtaggggttgggaaaacggcttttggatgcagagatgcctaaagccctggtctgcccactgaaattggcctctgattctgagggatcgagaatg

SEQ ID NO: 37104 - DNA, 201 bp, Bos taurus
ctggccttgcttgcctgtctacctgtcttagaactggactccttgctctctccactccagccatagggtcttgttgctgtttctcagataagctgatctcrttcccaccttggccttggtacttaaggttcctcagcctggaatgctacctctgcaaatcttctcctctccgattttattcaagtctccccccaaacgtat

SEQ ID NO: 37105 - DNA, 201 bp, Bos taurus
gcacttagataaaatctacactctttattttagtccacaaaacctctggccaagccccaatcacctctcccaccccatccgtggccattctcccttctgcyaactctctttcagttacagtagtctctttccctgcctcacactccccaagctgttccaacctcaagacttttgtactagctgtttcctttgcctagaatg

SEQ ID NO: 37106 - DNA, 201 bp, Bos taurus
acacgtaccctccccaggctgtctcctgaggcctgctccttggtttctgtgacccagttgcactgaccttgcagttccccaagttcactaatttcatggaytagatagaccagagggccctgggaagcagaccagtccaccagacaaattcctggtccctgtctgcctgtttgctttctggtcccttggaccctgggaaaa

SEQ ID NO: 37107 - DNA, 201 bp, Bos taurus
gtgtttatgaaggccatgaggttcctgtgagctgtggtggacactcattacatgaacagtgcctccctgcctgctgctcagtctgggttgtcaggctatcyatggcagtaacctggcctttgcctcatgtctgcttcctctggagtagcagggctcagcctctctcctttctgggttgggagggcagttggtgagggcctg

SEQ ID NO: 37108 - DNA, 201 bp, Bos taurus
tagctcagccaatggcgagccactcagcaatggagctgggacttgcagctcagccgcctgacctcaaagtccatgcagccaactccctctccgggatctcmctctagaaagtattttgacacctcaaacatgagccttggagtgtcctcctctcttctagggtgcagttcaagtcaagattagaaaaactgctgtagagat

SEQ ID NO: 37109 - DNA, 201 bp, Bos taurus
gtgcaaattgagaccataattcagattgttcatatcatcaccagcctccccatttccattaagccctgctgtccatctcccctgggcccagctctgtccarcagctaatggaaggggtcaagctagcactaaattaacaaaccactctggaggggtgggccccccagcccagcccttccagcccagaggccatggttaacc

SEQ ID NO: 37110 - DNA, 201 bp, Bos taurus
tgagcagcagccacgtggggcaagtatgaattgtggggtgagggagggtttggcactggcaaggggtccatggaacatggacagaatgaagctctgggagkgaggggcagaagcacatgaggaggtcaagcttcaggcccttcaccttgacacaatgggaaaactgagtaatgaatgattcttctgacaaaaggaaattgt

SEQ ID NO: 37111 - DNA, 201 bp, Bos taurus
ttctgctagagcgactcattgtcagtccccacgggaagcagctgcaggctcttaagtgctcaagaaacttcagattacaggcaaagacacaaagctggccytggactcttaaaataagagctacttacctcaaacagggctccctgggctgctgagctgctccacatgcaggcctggggcgagtgcctccttcccaggctg

SEQ ID NO: 37112 - DNA, 201 bp, Bos taurus
gtggggcaggaggtggcgctcccatgccctctccaagtgtaccatctccgatacctccatgggttccccagcccagaagctctctgaatccctgtacttcyggaatcttatggaggcctcatcacttaggtgtgtgtgtttgtattagccactcagtcatgtccaactctctgtgacctcatggactgtagccctccaggc

SEQ ID NO: 37113 - DNA, 201 bp, Bos taurus
aggaaggcaccatccatcttcctggcccaagaaccaagaaaccaaaatagacttgttgagctagtggtacaatatcgccaggaagtttgtttacggtcagrtttcctagggcttgagaggccatgctatgacttttctttttttctttactctttttatctcctcctccctgtatttctcacttaaaaaaaaaacttttta

SEQ ID NO: 37114 - DNA, 201 bp, Bos taurus
ttatatcaatggatgcagaaaagcattttataaaattcaacattcatttatgataaaaactctcaatagagtgggcaaggagggaacatacctcagcatartataggccatatgagacaaacccatgcagatgtaggagacatgagttctatccccgggtcaggaagactccctggagcaggaaatggcacccaactccaa

SEQ ID NO: 37115 - DNA, 201 bp, Bos taurus
acaatgaagactttttaaaactgttcattgtatgcagttttaaaggttactttccatgtgtagttattacaagatattggcagccttccccacgccatackgtatatccttgagcccttcttacagccagtagcttgtacctcccacccctacagttaagaatttaactgttctttcagattttttctgtctatataaaca

SEQ ID NO: 37116 - DNA, 201 bp, Bos taurus
tctgtgctgaaaaatagtgctgctttttgctgaccttagtacccatttcagcatcatgagatttacggccatccctgatggcctcttgtgacactgattartactgactgcttaattaaagtgaaacagtgacatgctttggggattttatttaccctcactcttccctttttacatattagcatcttctggagtttgcta

SEQ ID NO: 37117 - DNA, 201 bp, Bos taurus
actgtttcttaaaaatctaactttctctttagctctcatcacccactctcccccctaaacaacctggatataaaccagccttcccatcctgctcccttatyataaatgctgacttcctttcttgccgggagtgggggggcccgatagaccgtctccttttccccatcactgctgtgccctgtccaagacagctggagctct

SEQ ID NO: 37118 - DNA, 201 bp, Bos taurus
aagcaaatgagcagactgccagatgggatcactgagcaattgggcagtgggctccaaagggcagcaccataacctgacagaaacatgctggagtccaactyggccttgtgtatcttcgctttttgtgtccattttgttaggttttcctgggtctctggctggtggactgaaactcagagcatatgctgagaagcaccatcc

SEQ ID NO: 37119 - DNA, 201 bp, Bos taurus
aaaaatcagctgcttcctaactcaatgtaataaactataaccatcccccccataccttcacagtgttgtgaatttcagaggtcattaggtttctagccgcracgatcacatcctgacacttcttgttagcaaaatgagaattgatattacgggcatatttcagcaaatcagtagtatctccttttaaaaacctcatctcct

SEQ ID NO: 37120 - DNA, 201 bp, Bos taurus
cttgactcagaatgcactagaacagccaggccctgggttgtagaatcagcctgctagcctggagaccatgattaaaaaaatatgtatcttgtttgagccaytgcatttcaagtttctggccctgccccatctttctttacaatagtctagcctccatcttcatacaagccaactgtgcagcttcatttggatctcatacag

SEQ ID NO: 37121 - DNA, 201 bp, Bos taurus
aggcatacaccaggtaggaaagcgcttcttggtacctgagaaagttatcgatgaaaaacagctcagtgctcctttcccaaacccagggcttagtccccatygctctctaatacaagaatggaaccggctacagggatggaaaagtcttaagcatggaggcagcatggtgcaggtggaaaagagggccaaagaccacagcca

SEQ ID NO: 37122 - DNA, 201 bp, Bos taurus
attccctgcctggagtcccatgcccttaaggggctgtaactctttcacttttgtaagctaacctttattggcaagggctagatggcctcaaggccagcccygaagagatggagacattgtggagttggggagagggtggataaataaatggtctctgcctcaggggtaaaagctaagggcagaaattaaatggggctttca

SEQ ID NO: 37123 - DNA, 201 bp, Bos taurus
tcctcacaacaagactggctacataaatttgtggggcctcatgcaaagtggaaatgcagggtcccttgtttaaaaattattgagaacatcaaaatgacacyaagccaagcatggggcccttctaagtgcaggactccctatgactgcatgaagccagcctgcctcccagcctctcagttcttgccatgcctctgccctgac

SEQ ID NO: 37124 - DNA, 201 bp, Bos taurus
ggacctctttcgttcggtggtctgtgtctggtctcgcgggtcttgtctggtatattggggttggcactaaacgcatcaccaacggctgcgtgtcctcattyacaggcctctgatccgtgggcctcagctgcttcgctctgcaggtttgcgatttccctttccaggggggaaaaaaaatccttaaaaaatgctttgggaagg

SEQ ID NO: 37125 - DNA, 201 bp, Bos taurus
acaagaggatatgtggccttggagcctgtgagaaagacctccctccaggaacgagccagagtgtggagaacaacagaggccgagagctcgctgcctctgartgtctcctctgttccccttgacgtgaacttcttcctcaataaccttttacataatcagggcccctgaaggttagctgggcttcccatactgtcaccctga

SEQ ID NO: 37126 - DNA, 201 bp, Bos taurus
ggagtcaggctggaatggcttgcacccttgacctagaagaaaggaagctgggagcagagtctcgaagcccctgggcctgctctgcccccagggcgcctgcyttctgggggctctgtcctccctgagtcagatgggctctcttttcctgggactagccttcgaggcatggatgaccatggggccgtgtgtgctccccgttaa

SEQ ID NO: 37127 - DNA, 201 bp, Bos taurus
gcaagttattgccttgattttcatctgtcttccactgatttacttattagattcctccagtagagagtatctcttctagctttggataaaccactgtcctyaagtgtcctcatcagcgaggaaacgtacactgaccttcattttctgttgtttaaacttataaaaacaatagttttttttttttttttttttcacatatat

SEQ ID NO: 37128 - DNA, 201 bp, Bos taurus
gagtacatgcccttgccttttctagcttctagaatttgtctgcttttcttggctcctccatcagtgaaagccagcaactttgggccaagttcttcttagcyggctgtctggtcctccctcctttgccttcctccttttttttttttcccctgttttacttttgaggacccttgttacatttggcccacctaggtaattcaa

SEQ ID NO: 37129 - DNA, 201 bp, Bos taurus
ttctccatttctagcccacagctcaggacgaggtacatagtaggttttcagccagtatttgctggttcagcccctcccagagccctggaccatctctaagytgagttttttctgattccagtaaacactggaagccacccacatatgatcaagttggggcttcagcaagaattgaatcttgtcccaacctttccatccttc

SEQ ID NO: 37130 - DNA, 201 bp, Bos taurus
ctcattaatacctgtccaaattattttctgcctcacaaattattttttattagcatgtctgccacaaaactcatcagttgagtctctatcattgtactttycatttctggaaattctatttgtttctatttcaaatatattctttgttgccttttatcattttttgtttcctgaggatattttacagtttaccttttttcc

SEQ ID NO: 37131 - DNA, 201 bp, Bos taurus
caattaactctctcctcatctgattccagaatatctttctcctgccattttcccaccatactcccctccaccaggccacacactagcctccaactcattcycacctctgtgctcacaggtgacccctgctaagaaagaatctaggctttagaagccgacttggattggtggggccctagcacagaacagggtgcactggaa

SEQ ID NO: 37132 - DNA, 201 bp, Bos taurus
tattagttcttagagctcagggactattgaagaatatgtcctaatttcatcctcaaaatatttgaagtcagtgatgaattgaatcaaaccaaaaccacaaygaagacccgatccagttcaactgcagatctggtggtctgacataaaacagggtatgcctttccctgaagtcaaacattatttgtcaagtttctgctttgt

SEQ ID NO: 37133 - DNA, 201 bp, Bos taurus
ggaggatcagctgggcaacgtgctttgctgggtgaggctggggcaccatatggtgcttatgaaactgtcattagccgaggtggcagtggtgaatgggggargaggggggcaggggcgagcagaacacagaccagcgttattctgaaggaaaaagcaggatgtaccatttatccataacaaggaaagaatgaaatttctacc

SEQ ID NO: 37134 - DNA, 201 bp, Bos taurus
ttctgtatcaagtcagctcatgactattcttcctggtgtaaaactaactgagagattcaattggacaggagagactcaatttgtcatcatgagactagacmagcagtgcactcctcagctaaatagagaatattcactagacacaaaattgaccgtaagctgtaaatgggaaataagtttaaaatggctggtacaagtaga

SEQ ID NO: 37135 - DNA, 201 bp, Bos taurus
cagctaagtatttgggactcaattgcaattcaccttgaattactacaatcaattcctattgcaaaggaagactgccttacttttaaaaaggaccattcaarctttctattaagtaggaagattatgattgcatgtctcttcttccctctgaagaattgattaaactttaagcatctcacattaaattaaaggaaaaaaaaa

SEQ ID NO: 37136 - DNA, 201 bp, Bos taurus
cattatacttcattatggttaagaggttatcacctcaaaggactggaacgtgtctcaggcaagatacttttagcagtgtctcatctatgaggccaggtatycagcaagtccagcttcccagagcatcagaggggagtgtcagagctccatggcgggcactaagtcacaccaacgccacaggcctacttaagccctaagcaa

SEQ ID NO: 37137 - DNA, 201 bp, Bos taurus
ttgatggtaaagaaatattatcacattaatttttttatttatgagtctgttccgatttaaaaaaaaaaaaagagagagagagtgggggtaaggcaagctcktctttactcaagaaggcctctacccaatgcaggggaacgacaattagaaaaagtacaattttgcaaacactggtgcaatacttgattaagacaaggcgta

SEQ ID NO: 37138 - DNA, 201 bp, Bos taurus
gaagggagagagtttcactttgtagtctggcatcatctttctccagcagaagagacaagcacgcccccctgagagccacctcagggatacgcggccctttrcatgctgttgtgcaggcttccaagtcaagagggtgcgccaattggatttattacaattggaaggaaagaaattgtaatctttaaaagccaacgacatggc

SEQ ID NO: 37139 - DNA, 201 bp, Bos taurus
ccaagacactgggtttaggatggtaaaatccaggccattcctctgggtgtgggtcgagttctcatgtgcccctgggtgaagtcagcttctacccagaagartagagtagaagagtctgggcctgcagagtaaaggtcctcagggcatacatctgaatggaatggagaccctgcggggactgagagatgcagcagaaggcga

SEQ ID NO: 37140 - DNA, 201 bp, Bos taurus
atgaaggcgagagaagggggcaggcaggcttcatttctcagttctttttcctaggcaaaaagggaattaagagtcagtctacgcgggcctgggggaatcarcactcaggattcagagagccggcagacacagagggtcaactttctagtgcgggagcaggagagtgatctggccgcgaggctgggaagggcagcgggttgc

SEQ ID NO: 37141 - DNA, 201 bp, Bos taurus
ctttttctgttcccactttggcccctgactgctgtgtgactctgagcaacctctccacctctctgagctgtggtccccattggtgaaaagaggagttcctrctggccttttacagatctgattttctggggctctcagcctcccatagccgtcactgataggatattttggtggtaaaattttttggagggccaatctgga

SEQ ID NO: 37142 - DNA, 201 bp, Bos taurus
tcctaaaatgaatagcttagaatgaaggagggaacaaaagcaagggtgagggtgggaaaaagtgagagacagactcaaggactgagggatccataagtcaygtggacctttgctacagggacagagggcaggaggactagagcaaagctggggagggcaatgggtacttcatctcccaaacctttatttcagaatcatttc

SEQ ID NO: 37143 - DNA, 201 bp, Bos taurus
tactatgtgatgtgcaaggctgtattggaaggccattcagattctgctggtctctcttgagatactcactctgggagtcttcagcagccatataagaaccytggcctcctggaagctgcgtgtggaggaccacagaggagggacaagatccctgagagctccagtggtttgtgtctctcccagcccagactccacacacat

SEQ ID NO: 37144 - DNA, 201 bp, Bos taurus
attaagatatatctatagacactagaatgtgaagtaggagatgctaagtgttgaaagagaggcacagatacctagctacaggaatcagagggaagagacaraagttccacgtgggtgattcaaggaagacttcatggaagaagtggcattcaagataggctttgaaaatggataagattttgccacaagttgataagagga

SEQ ID NO: 37145 - DNA, 201 bp, Bos taurus
ccataacaggcacttactatacattcattgtggggctgctgatgagggtgacagaagttactgccatatttcctgagtaggaataagaaatgaatctcttkggctttattttaaagtaagggccaggaaaatgaaagtggttttgttggtcctacagggaataggtttggtaaaccaatgaaaaaaataaactcttgagag

SEQ ID NO: 37146 - DNA, 201 bp, Bos taurus
ctggtattttctatgaggaaatgaggggtggagagggtgttggtttcctcacaggcaggcctagacccccatgctgtctggagtcacctgctcccataatrcatcctcagcatcttctccggtatctttccaggtgcgcaaggactaactttgccctaataaatgtttaactcttgcccaactcctggaaggtaatctctt

SEQ ID NO: 37147 - DNA, 201 bp, Bos taurus
gtactgttgtgagagtgaaaagcaaagcccatcgcaaggggcccggcacctgcacgctcgtaaagacaacaggagcagcagttgcagtcacagtagctgtkacgggaaacagcccacaggccacattttaagaagtacaaattaactaattaatttcagactaaagcaggtcataaacgctaagacgaccgagatggtgat

SEQ ID NO: 37148 - DNA, 201 bp, Bos taurus
agatttccttgcagtcctctgcccccagcatctttgatggcttttcatctatggaaagactgtctaggaggactctgtccccctcagtggccctttcagcyagcacaagacagcctctccctcctgatggagccaccaccttccagaggctgggagctttccctccaggagaagggacatctgccttctccctaaaggagc

SEQ ID NO: 37149 - DNA, 201 bp, Bos taurus
ggactgaggtctcagctcctcttctggccaccagtcagggctgttctccattcccacaggctgcccacaaccctcctccagggggcccctccaccttccarttggcatgcttatcaattcttctctcaactttcacttccgccaccagccagagaacactctacttttaaaggaattgcttgattagatggggcccacccc

SEQ ID NO: 37150 - DNA, 201 bp, Bos taurus
aagcgggggtgaggaagatagagcaccaggcagagaagcagatggtgcaaaggccctgaggtgggagtgtgcctcttccatccacagaacaaagaaggccrgagtggctgcagcagagagcggggcaggagagcagcgagagatgaggagggaaggaggtcaggttccagaggattttgggggccaccataaggttttggc

SEQ ID NO: 37151 - DNA, 201 bp, Bos taurus
aacagaaaggcgggacatgctctatcatcttggaaatggcacagtcgtggtcattgtttttgccaggacaggctagattttgctgcagagacaaaaacctmcaagtgccatcatttaaaacaaccacagtctgttcctcactcacactgcatgtccattgagggttgcctgggagacctgggctgtcagcacctacctggc

SEQ ID NO: 37152 - DNA, 201 bp, Bos taurus
atggtggggagacatatatctcaattcattctcactcagggacccaggctgacagcatctccagcatctcaaatgtatcagtcacaacagcagaaaggaawcacagtgaagtacatatcatctcttaaggcctctgtccaaagacaatcttctactcacattttgttttcaaaagcaaatcacactgcaatgcctaacttc

SEQ ID NO: 37153 - DNA, 201 bp, Bos taurus
tatggttctggcccaggactcacccggaccttgatggttcgagggaagtcctctcacagagttcttactacctgctccccactacctaccagaggtaaaayggccctttagcagcctttctccatcctaaggacaccacataccctgccctgcctcctccatctcacgctggccagtcaaaaatgttctttcttcacctgt

SEQ ID NO: 37154 - DNA, 201 bp, Bos taurus
ctttgaattcgtttcacgtttattctcaggatacaatattcactctctgcgggagaacgggatgccacaaaggcgggaaaagactaaaacaagttacaacycggcctgaacacactggagatactgcccaggggcgcgagcagcggcctgagagggctctgagcgcaggcagggtcagggtcaggggcgcggggccgccgg

SEQ ID NO: 37155 - DNA, 201 bp, Bos taurus
agtgccttagctcctcagtgttatagcaactctgattggtccaaggaagtaaacagacattgggaggctataataggaggaaagacaatgagaaatcaccragggagaaggcctcgaagtgggcctcgagggggaactggagaccaggaagtgggtctgggtggagggaacggcccccactggtagccatagggtggaggt

SEQ ID NO: 37156 - DNA, 201 bp, Bos taurus
agaagcttctacctttggttgctcctcattggcccccattttggggggtggggcagggcatagcttcctctttcattccttgatgtcccttggtgttgttsccttgaaaggcctaaactccattctgggaaggaaagagcagatgtcaggtcatttgggactaaaggcttgaactggctgttctctggggttccctcctgg

SEQ ID NO: 37157 - DNA, 201 bp, Bos taurus
ctgaggataccaaaaaagagaggaccaggcccctgggccaatgtcctctgtgcttttgacctggtatacagattactccaaaaaaaaaaaaaaaaaaaaamctgtccaaggcctgtttaccacttcagtatagaaagcggctctcagttctcaatttcatatataagagactatgttttaagatacaaagtctatatcaaa

SEQ ID NO: 37158 - DNA, 201 bp, Bos taurus
ggtcacatcctagcctagatcggatagaacaggaatagcaggttaaaatagaaagtgaagtcagagaatctgaaagagatgggagacaggcagaagagacragaagttttcaggccatataagcttaaaggggcttccctgatggttcaaatgataaagagtttgcctgcaatgcagaagacctgagttcgatccctggat

SEQ ID NO: 37159 - DNA, 201 bp, Bos taurus
gacggaggttatggatcaccacaaggatggaagctccttacactcgcagaatgctctctctgttaggaagtcatttgggcctcacagtaaccagagacgaygtacagggttgtagtggtgttcccattttctagaagttccacattgcttggccattccatcacactcaagactttactcataagtgaaaatcttttgagc

SEQ ID NO: 37160 - DNA, 201 bp, Bos taurus
gagggctgtgctaccctgcctcagagtgtcccctggaaaatgggatgacaaccctcgcagcagggcagctgcaggccctccattcagtgcccgctgactcygagcctgaggcggggagggctgacgcctcttgtatctcatccaaaggaagctggttacccctggagtggggttaggctgaggcagctgcttcagggcttg

SEQ ID NO: 37161 - DNA, 201 bp, Bos taurus
cctttgctgggccaaggccaaggagctcctgttacagccctgctttcttagttaattaaacattcagcctgcgtgcccagagatgcttttatgctacattrtttttcagctacagggggccctaaagacaccaaatctaggttgaatctccatgccttcctctcagcatcctactaagactctctctggatgcccagagac

SEQ ID NO: 37162 - DNA, 201 bp, Bos taurus
ctgctcagggcctttcctggggcatgagagcatgagttccccgtctcctctgagttcaggagggagcagcaggagcctgagtccctgggggccttgcgtgycctgtccaccttcctggtatagttagaaccactggtttcagagcaggacaagcctccccatctgagcacgcactcacccacttcagttatcaccactgca

SEQ ID NO: 37163 - DNA, 201 bp, Bos taurus
agtccatctctcgccccagacaggccccccagcttcacctgtcatacttccagacacaaaaggttcacaccattgcatctttgacccaccgtcaccttcartctctgggcctggctccccggcccactgcagcccccagcccccaacccagaggtcggacttgggttccctcttcaccgatctccctgctcgcaactggct

SEQ ID NO: 37164 - DNA, 201 bp, Bos taurus
ctgaatcttcaaactccactctgcctccttctcatgtgccgagtaattcattgagtcccagggacgcagcagagtggtgctgatgtcatgcacttgaatckgccagacctagattcaaacttaggctctcctctcatctgaattccagtttcctcacttaagttgtgaggatcaaaggagagagtgctttccacccgttta

SEQ ID NO: 37165 - DNA, 201 bp, Bos taurus
gacccaagccctgtctccaccgatcttgcagttctggctgctccagcaacccaggcatggagggcatcatggagaaaggaagccacagcacaggagcgagmgttagaggggccagggctgctggtcggctgcctagaggagagggctcaggtgggcaggacatctgcatactagtggtcagtgtgcccatgtagaagagga

SEQ ID NO: 37166 - DNA, 201 bp, Bos taurus
aatttttttttttttttggcttatttctataaaaacgctaaaggaaattaaaatcaaatggcttctaattatgcacataatgaattgcccctattgaaaaygataaaatgttatgaaacgacatcaaaaccagtgcaaataaaacatacaaatgttttgaagggaaaaggttccaagaaatcctagggtgactcatggttc

SEQ ID NO: 37167 - DNA, 201 bp, Bos taurus
agccctggcttctgagaagtccttctcagcacaccagggggctggaaaagagatgagagaccagagggaggggcctgcttccttgggggccagggatctcrgagagctgctagtttgggcagaggctaaaagtgaggaagagttacaaagaaaatacagtcttgcctggccttaagcaaatcatttctccagaccctgagc

SEQ ID NO: 37168 - DNA, 201 bp, Bos taurus
ctatgggaaatgattgattttcaaagtagaagaaaagaaggcatgggtaccagagctgatgggtgggggcaccccactcagggggcaacagtgaacaaccractggggaagccaggggtcattaagtgtgctttctacacaggggacttgtcccactgccttcctccccttcctctctgccctgatatcagccacaagcag

SEQ ID NO: 37169 - DNA, 201 bp, Bos taurus
tgcactcaccaccacagcctggcctcgctctgtggctgggaacccaagcctccctccaagcgattgcgggccaaggccacctgagataagtagtgtatgtrtgtcaatgctgctctctcaattcatccttttccctttctttttgttaattgcaatgaggaaacagaggacaacagggcctaacccactcaagttcagttc

SEQ ID NO: 37170 - DNA, 201 bp, Bos taurus
tctgtatgagatgtgcctatgtttgttgctaactgtcaggtccgattacagctgagtgatgtgtattcctgagcatccattcaggaaagaatatatatgcrggtgtgggttggaatttttgtgtatatcatgaattaattgaaggccaaaacaacaccttatttacttggccagatacacatgggcttcccaggtggctca

SEQ ID NO: 37171 - DNA, 201 bp, Bos taurus
gcacaagcaccactttatgctcatgctgaatgagaactagtcaaccagcctagagatttatgggaaatttttgtcatgtttaagtgctactttgttgttayaactagtagctcagtttcctctttgactttaataatcctctctatttaacctattttttttaaaggtatagcaaatagaacatgtcaacagataaatgca

SEQ ID NO: 37172 - DNA, 201 bp, Bos taurus
tgttataagcagtccttgatgtgtttttgatggttccagcaggaaactctgaagttagagggcatcccacactagataaaaaatagatgttgcctgtcaaytgtgcttataactgaaaaaggcagtccaggactctcacaaatactagaacgtatgctactaaatcaatgtgttccctgggcctctaaggcacaggttgac

SEQ ID NO: 37173 - DNA, 201 bp, Bos taurus
ctgcagtctttataaagaataaggaatcttgactccttcacctggatccagatggtttcattgatcacatcggtataagatggacaaagggctactttttkgttgttattgtcatttccttggttgtgaagaaggcctgaaagaaggaagttcaggatctttatggcatgcatgaaataaagctggaggcctgtgctctta

SEQ ID NO: 37174 - DNA, 201 bp, Bos taurus
agaatctgaaagtcagcattctagtagtagttatatcactaaataactgagtgtgacattctacggatctgaagatgttgagaaaacacatgtaaaaaaakgattagtacttatttacatgttccttgcaggtgctgttggcagcagcagtctgtacaaaagcaggaaaagctattgtttctcgacagtttgtagagatga

SEQ ID NO: 37175 - DNA, 201 bp, Bos taurus
tggatcccagcccgcttggtgccgtgggagtggtggccggtgggggagccggaggtccctcagcagatgccacctccccactccaggtttaccgctccaaratggatggcgaggccaccagccccctgccccgcacccgcagtgggccactcccctcctcctctggctcgtcgtcttcctcctcccagctcagcgtggcta

SEQ ID NO: 37176 - DNA, 201 bp, Bos taurus
cctggacttctctttttttgtgggagatatgaggaccattaaatgagggatctctgaagacaaagcctaatgagttcactacccagctcacagtaggtacytgaaagatgtgtaatgaatacacaaggaaggcacacagccagaagggattcatgggtgctgattttcccatgttcccagctccatggcacccgagtatgg

SEQ ID NO: 37177 - DNA, 201 bp, Bos taurus
ttcagattgttcttatgcacctggtgccattatatccttgtggtcaataactttctccttgttgtggcttactccacaaattaaaataactttttggcccrttatattttggtttgtgtattttatctctcatccagcatagtactggatacctggtagattcttagtggaaaattatttgaaaagtcaaagatatcgaca

SEQ ID NO: 37178 - DNA, 201 bp, Bos taurus
gccactgccctcgccatcacttaaggagcagggtgtgtgtgcctgtgtgtggtgggtgggggacaggaggggtgatcactgcggaggtgaaggtgttcatytcctgaggggcaggtctctttggccaagtcaagatgatgtgaggagagcaggaacacagcaacacagctgtgtagagagggccaggaagtggaaggccag

SEQ ID NO: 37179 - DNA, 201 bp, Bos taurus
ccttcgctctcctttcccctcatggaagacatagagacagcaggccatttcttcaattctgtctttatcaccaggaaggcgcttttaatcaaatcctaagytgagtggcaggaggcagaggggccttcccattctgccttcactaactctattccagagagtaactggggagtctcgaatcctgcttgcatcacattaaca

SEQ ID NO: 37180 - DNA, 201 bp, Bos taurus
tccctgggacgctcctgtccaaggtcctcgcctcctctctctcacgttctcccaaggtgaggtcatcttcctgtggctttaattaccatctagaggcccaygaccgcctctccagtgcgggcttgtctcaagagccagagacccatccatggagcagcttgtgaacgtctgcggacggaagcctcacggcccttccgtctc

SEQ ID NO: 37181 - DNA, 201 bp, Bos taurus
tgtggttgctgctttctgtgagctgaacagggtacatgagtgactgtgctgagtattccctgcagagaaaagcctgtgtaccagcagcaggtccgattggkttgactggcctgggacctggaggcctacggccatggctgccttgttctgggcaagccaccccatccctctgccggggcacgtgccccggtgctgccagag

SEQ ID NO: 37182 - DNA, 201 bp, Bos taurus
aggcacagcacctgcctccctgtcccacctggagaagcctcgccagcaacttgtgacagatggcagcactttgagtgactacttcaattttaactcctttygataatccagcgccagaaagccacatactttaaaactgtccccggatcatagatcaaccccaaaggccaagtccagctcagttaataacctctggaaaca

SEQ ID NO: 37183 - DNA, 201 bp, Bos taurus
gctcaagatttaaaactgccttggtgtcactgtttgggtcaccagattcatccacaggaaggttcacatttctgttcaaaacagtcataaagtttaacacrttgaacatctgaggcctttatttctcagtttggcctgcaaatctatgccaagaaagagaaggagcgtgggagggaggaggggcctggagtgagcgcacac

SEQ ID NO: 37184 - DNA, 201 bp, Bos taurus
tagagccagacaagtttctacctgaactttcactctacctgtgactggatggaggagccagaatagagacttggtaaaggaaaatgccttctcttttctgyttccagaccataaaaggccaagagaaaaggaagtgctgatggtggtggggaagcaccaataagaagagatggtccttgggcagatgggagctccaaaacg

SEQ ID NO: 37185 - DNA, 201 bp, Bos taurus
ctcactcaccctttccaggggcagttttccccccaatatctccaagaagagtggtcccagacaccccccaaccccattccaggcctttagccacctggctsctctttgtccatggtcatggtggtccacccagagagccccaaagcccagaccagcacatctcccaaagctcaaagaccagcagttgcccatggccagcag

SEQ ID NO: 37186 - DNA, 201 bp, Bos taurus
gtgaggagggaggaaggatgaacggactgatgtgagagcggccagcgggatgctgctgaagcaggaggaagtgggcagtgccaaggagtgggattaagcayacagacaaagagccagatggcctgcattagagtcctgggctttgtactgcttggcattgtgaccttgtacaaattcttcaacttctatatttctctgggg

SEQ ID NO: 37187 - DNA, 201 bp, Bos taurus
ttgataagttttgtcttgataactagggtcacagagtttctgtcctatactcgtcgaagccattaaagtcttgttagattgacttactctgtattgttcayctgtgatgtacccatctccaaagacaggttagcaaagtggtaccccgtgtttcacaatgagattattacagcttttagtgcttttgtcatctctacaact

SEQ ID NO: 37188 - DNA, 201 bp, Bos taurus
caggccaggtccaaggaagcacgtggatgggaaactcttacttgccccttgttccccactgatgctccgtcagcccttttagagccagaatccaagggtgkggggagtcttgaacgaacctttaggccacatgttataatttccaattggaagtgagaagaagagactttgttttgggctcacagctcaaggtagaaccag

SEQ ID NO: 37189 - DNA, 201 bp, Bos taurus
tgtccagttccgtccgctctgctggtgctggttgtggttcatgccagaccacgtccagctgatttccagccaggggccctgctggtggacaaggtcagacygagcctgatctcctgcagagtccaggaagctgagtgaagtcaacaaagagagagaaaagtaaagaaaaaccaaaacagcaatgcccgggcttgttttgct

SEQ ID NO: 37190 - DNA, 201 bp, Bos taurus
ctctggatttccactctggatgactgcagtggctgagtcaggaggaggtctccattagcatccttagcaccccaattaaacagctaacctcagaaagccaygcagactcagctatagacaagttcactagctccattcccccttgcagcctgactgcctttcattccctcctataaaaattctggagctgccgctgggaga

SEQ ID NO: 37191 - DNA, 201 bp, Bos taurus
acacacagctcctccggcgtcattcacagggcccatctctgcttggcagtcttcctcctggactcttatatgtgaggtgatgtgcatggcagcatgttgtkaagaggagcctggaggggccgtccacggtttctgttattaggataggacttgctgtgggtgggataccttgctgggcatctagcggaatgcaaagcatgg

SEQ ID NO: 37192 - DNA, 201 bp, Bos taurus
aggtgggcaggtggggggtctcctagcacgactcccgacatctgagcccgagggaaagaggtgggggcacaagactgaggggttcaccgagggaggcctcrgcttagcgagccagcaggctgaaagtgaggagttgagaataggcagcggctatatgtgaaggtccatgctctggcctgaattgtatacccccctcaaatc

SEQ ID NO: 37193 - DNA, 201 bp, Bos taurus
gtgcagttagttacacaggccccacacttaggactctgcactttgtttaatgctctgttgttgccatcttgaaattcttaacaaggggtctgaattttcaytttatgcagggccctgcagattatgtcaccagtcctgcatatacccactcattctccatcatcccctccctccaggtacctctccagccacagggaaagg

SEQ ID NO: 37194 - DNA, 201 bp, Bos taurus
acattcaggtcggatgatagccatgcccatgaagatgtccacacgaggatgggcctccctgtctgttctcctagacgtgcaatattggccttcaagtttcyggtcacagacttgtagaactggaaagagacacgtagagcctttgcagtgtttcttattctcttttggatcactggcccttttgagaaacttctgaaatgt

SEQ ID NO: 37195 - DNA, 201 bp, Bos taurus
cagcagagcagctgtcttttctagacctgagttctgcaagcagcctcacagttccagaatgtgggaggtggcagataaccagtttgtttggttgtagaacytgatctcatagtaactttaatggttgaaagtcacccccacttcatttttacccccatgtgatttcttcagccccttgagttatagaggaggaggtgttct

SEQ ID NO: 37196 - DNA, 201 bp, Bos taurus
tatccgcgccgcggtgatgtgaatgtctgcctgcttcctcaccctgctgctccttgcaccactttccagagaagaagtgcaacgggttccgctgcccgaayggcacctgcatcccatccagcaaacactgcgacggtctgcacgactgctccgacggctcggacgaacagcactgcggtgagtcctcacgtcgggctaaat

SEQ ID NO: 37197 - DNA, 201 bp, Bos taurus
tcctttttacagctggtaactgaggcataaagtgataagttaccctctgggtggatctgggacttgaacctggctctttgtttcactaaagggcagaggtyctttgagggtggagcaatcacatgtgattcctgatccatccttctgggagggacatagcagaatactgcactgttaaaggtgctcagcaacatctctatc

SEQ ID NO: 37198 - DNA, 201 bp, Bos taurus
atttatatgaccctgacttatatttgtttacccatttctctctcccactggccaatgaactctacggaaatatggattctttgtttgtaatggccagaacmtagtacagtgtccagtgtagagtaaaaatttcctggaattttctctcttccttccttcctcattgacctccagcactggcaatttggccatgccttctat

SEQ ID NO: 37199 - DNA, 201 bp, Bos taurus
tcttctagagctcccttttcttataggcacagagctattacatagtttataccagaagagaaaaaaagaaattttccagttgaaactcaaatggttacatmtgaatgtggaacttaaacttctgtataaacccactgatggaagcctggtaggggctgaacaactcggacttggtcttttatttttttttcttttggtaat

SEQ ID NO: 37200 - DNA, 201 bp, Bos taurus
ctgagaatggtcccctctgaatttttaattatttcctacaatccagtctttggatgccttcaaatttaattcatccatctgcttaaggtaatgataacccrtaaaagcaaagtatcccaaaataaccagcttccacagcacttgtggacacactcaattttccaaatatcaactctatacacatctgttaattgaagtgta

SEQ ID NO: 37201 - DNA, 201 bp, Bos taurus
cctgccttcacacagctcacagtcagaaaaggatgctcaagagcttgaactttcaccattaactctactggggcacagttaacgcctctactttcaagaaygcctttcttcagaggaaattgacacacctcagaagtcttgactccttcaacccccactgacctttgcttcctttgccttattactgttaaacaataaaaa

SEQ ID NO: 37202 - DNA, 201 bp, Bos taurus
cgatgcttattctcaggtggtttttaaacaatatctgatgaatatcctattagtatacttgttggcctgcttattcctttggttttagaggagccagccakaagatagtttttctctattatcttcattctttaaccattttaaaattggagtatagttaacttgcagtgttgtgttagtttcaaatatgcagcaaagtga

SEQ ID NO: 37203 - DNA, 201 bp, Bos taurus
gccatggctttgaccttatgcctgggagtggcgagcctttactttcatggtctctgggttcatcactgaagtgacagtctctaatgcctcgttctatgatkttcagggccaccctcacagcaacatgaaggagcgttagaatgactctctcctacaatcatcagatcagggttggccttggtggtgaccttaggacacaaa

SEQ ID NO: 37204 - DNA, 201 bp, Bos taurus
ctcccaccaggccatgccaaccctggcatctggtcctgctccctagcacttatgctcttttgattaaagggctgacatacacaaacaaaccataacttacrcacgacatggttagtgaggagaggccaaatgtggacgagtactgactcataaggtaagaaggagtcagtttgcaaatttccagtcttgtttgtctctggt

SEQ ID NO: 37205 - DNA, 201 bp, Bos taurus
tggcattacaaaacttcccctctttgtataggtcataagttatttatgttgacattatgtattatgcatgatttggaaatacatctaacatcaatgtacayggcctcacaaagattcattaaaatgcattctatgaagttttaaacttccatttttaaacagaaatatccaaaaaaattgtatcttgtaatccctgaaacc

SEQ ID NO: 37206 - DNA, 201 bp, Bos taurus
ttcgtcactgggaaaatgaaagcacattgctgcatgtctcaccgtaggcctgtgctggacctatcctgcagaggattctgttaacatcatcaagaagcackagggggctttaggaggtggctcttgtttcttttcttccttcctaaacatttcatacaaatatttgaaactgattttttaggagaaagtctttcttttctg

SEQ ID NO: 37207 - DNA, 201 bp, Bos taurus
gtctgatgttgtagccacaaaatcccagtccctcccaaatgagtaaaccaggtctcggccaggacgcggctgatttataaagcgcatatggtgggcccttrctggctttcctgccaggaagggggcgaaccagctcccccccaaatccctgacccatctccccaagaacgggcctgccaggctagcagctcagccctggtg

SEQ ID NO: 37208 - DNA, 201 bp, Bos taurus
tcacagttgaaacagagtctccatgatgcctagttcttgggaaaattttttttttctaagatagtgtattcacactttcaggccactaaggtgccacttaktgcatcacgagacaatgctgtgtcctggaaataacttgggccttagggagaaaataagcccttgagatccaatcagcaggaagcacaggacacaccagtg

SEQ ID NO: 37209 - DNA, 201 bp, Bos taurus
cttctgcacagtgtatcggccttccacattaacacacgatacagcctcattccccactcctttcctgacccggaaccctggccactccccctgcttcaacmctcttttacacatgtctcatttcagggcttcccaacatagtgtgcctgtcttcaggcctctctggcagaagaacagaatgacaggagcacttttattttt

SEQ ID NO: 37210 - DNA, 201 bp, Bos taurus
tttcaagaagctgacaaagagcttgccaactttgtgtggcaaatacaaagttgtatttgagctcaaataccttgagcttgcctgtatcaattgtttgagaygggtagcttgaggttgcttggctttcctatgacagcgatatcaaaaaggggcaggaaaggctgctactcactcaaaggtctatttgagggcaaacatggt

SEQ ID NO: 37211 - DNA, 201 bp, Bos taurus
tgtcaccacagagcattgagtagagttccctgtgttgtacagtaggttctcattggttatctattttatacacagtatatacggcaatcccaatctcccarttcatctcaccccacttctctccccttggttttcatacatttgttctctaagtctgtgtctctatttctgctttgcaaataggttcatctgcaccatttt

SEQ ID NO: 37212 - DNA, 201 bp, Bos taurus
tcttcaaagtattttttccgatttgcaactcaaatggaatgagtagtcatttaaggggaattaaattgtgacttaacattggccttataatcaagatgggyagacattctttggacaggaaaccatggcagagaatggttattttctggagcgcagggcagctccagagctcaggagggcctgggcttcccacacagggaa

SEQ ID NO: 37213 - DNA, 201 bp, Bos taurus
aacaggtctctcatttcccgaccttcagaggggctgtctgttctttctgggtggacctttgtgactctgccttttctctctggacggcgccgctgcccctyaggccaagccgcaatcatggagccggctgatatggcgacagcaaaggtaggatggaaatgctgccggccgcactgtgcgtaagtggcttcgcttggcgag

SEQ ID NO: 37214 - DNA, 201 bp, Bos taurus
tgggtgaaaaatcgggctgagtgagatcaaaagaccttctgctttggagattcttggagtctgtggttatgtctctggcccctataagagagaggagaccytccctctcaatctggagaagtatctatagaataagagcagatggagattccctactggtctccaggatgaaatcagaaggccccgtgctcatccctaccc

SEQ ID NO: 37215 - DNA, 201 bp, Bos taurus
acctcgttacctcactcctgctccggccatggctgtgacgggcccagccagctcctggttccgatgttctgtgtgaagctcaggggtcttgggcattgttktctgttgtaactcgaggccctcagcaggcctgggagcccggattggagccttggctgctggcgagaagcaccttgcctgctaggagtttgatgccggacg

SEQ ID NO: 37216 - DNA, 201 bp, Bos taurus
tagtgactgaacaacaacctctgttctctttagcagctgcttccttttggggctttctttccatacctgcctctatcttcagcattaggaagagactctcygaagtcagtttagcctgcttcagaagactaagaggcctttgaaaatttgaggagataagtcatttttttaaatgtatttttattttttagtttccctatt

SEQ ID NO: 37217 - DNA, 201 bp, Bos taurus
gctcctcgggggtcaaggtctgtgcagggtcctgcagctcactaggtgacccgggctctgctcctggaggcactgtctcctcggacaggacttcctggccrtgaacatggacagtcacctgggaacaattccaacttccagtcaccgctgagtcaggataaagtcctgggtgtcacagatctcacatcagaagaagctgcc

SEQ ID NO: 37218 - DNA, 201 bp, Bos taurus
gagaattacatgggcagaggagcctggcatgctgcagtccatggggccacaaagagtcagacacgactgagcgactgagcacacacaaacgatagctatcrtttatgaagtacttagagtgtgggcctgggtcagagctgtagggagtcagtagataccactgtttcttgctattcaggaccacttgtgagacagactcag

SEQ ID NO: 37219 - DNA, 201 bp, Bos taurus
caggtagacacagctggactccggtctgactgacccctcccatgaacaaaggaaggcaaataaatcctgtgtaacttggtggttattacggcccaggaagygtgctaaatgctttacatttattctttcatttttacaataaacttgggcacagatgttataatcactgtggtaaaaataaggagactgatgggttagtca

SEQ ID NO: 37220 - DNA, 201 bp, Bos taurus
cagaactggaggactcctgattaagcaaaggccaacgtgcgtgtgtgtgtatgctgggggagatgctgggaaatggaagtatttagttgaccaaggctttkctaggggccctttttctaaaatttctctacatattattgagcatctaaaaaggtacctgagctagcctccctgcttcaggaagaggcattttggggagaa

SEQ ID NO: 37221 - DNA, 201 bp, Bos taurus
cagtccagctttagctttccctgacttcctaggaagaatcaattgttccctcatctctgttctggtacactgcataaggggcctctcacccctggctatcrtgttagtcttctgtgtgtgtttccgtcgttgcctccacgcatagcctggacgtctcttgagagtcaaaactgcctctgtacttagaagagggcctggcgt

SEQ ID NO: 37222 - DNA, 201 bp, Bos taurus
cctcagaagtggctgtgttcacttaggaaagtgcttttgatggagacatcttgaaattcccagtcaggtccgaacaccagcaccgaggccagtgtttgtayagaagcttctgcggaaacagtattggggtggaagtgggctgtggggagagtcagctgacttggactccaacacagctattgtggcctcaggctgcactga

SEQ ID NO: 37223 - DNA, 201 bp, Bos taurus
tgtccaggggcacaaagaccgttaccggctgagaacatgaatgaggagaatgggcacaagggcaccaaagttccttttcagaggccagacagagtctcccytcccagcaggctgccagctgaaggcgcttgctatggaattcaacagcctgagtcctgcctagggggcagaactgtcatgggaacatgaaattcaaaaccc

SEQ ID NO: 37224 - DNA, 201 bp, Bos taurus
aggacagttatcctgttataacagggcagcatacatggaataaatcaggggaatattgggagtaagctgcttctagtttttgcccttttctgttgaatcartcataaatatagctgtgctgaaggcacctcagagtctgcaacatgtttgacttttagccattaagtcccttgtagcaggacatccagatggatgaagacc

SEQ ID NO: 37225 - DNA, 201 bp, Bos taurus
gctgctggcaggcctgtgggctggtcgggcccgggttggaccttctctggggaaggcacagtctccacgctctcagtcaccagggtatgggcaggaatctkttctgcagctgttctggcctcagctggggggctgctgggactggaagggccctgggcctgtatggactgtgggacccctgtctcagtcatgaccttcgtc

SEQ ID NO: 37226 - DNA, 201 bp, Bos taurus
actgactggacacagactccgtcctggttctagtgagagaggaaggccaaatgggaaggattagtctgtctccctgctgatcccaacagagccctccaagrcagggatgtcagcacagtttgaggccaggggcaggctcctcacagtgtcagagacccaagggacattaggggtcctctaaccaaatgctctgatctgggg

SEQ ID NO: 37227 - DNA, 201 bp, Bos taurus
gctagtaactgtctcattagccaggcggtgaatccatgtgggtataggtggctgtttccacaaccagtgaaattcctgttcctcacttgatcaaatggccyagagcgccatctcaaagtaagaataataacagcactgattattatcagcctccatgtgtcaggctctgtaaggccccatttaatcttcacaataatccag

SEQ ID NO: 37228 - DNA, 201 bp, Bos taurus
catgtgaccctgggccagccactgaaccatgatgaaactccatttcctcatgtataaaactggtctaataatggtgtgcttctcactgggtgttgtgagcrttgtacctggtgaacactgggccctgccccttgcttccctgtaagatcaggtctcaaactcagcagcccaattttaaggtccattttgctgctcccagca

SEQ ID NO: 37229 - DNA, 201 bp, Bos taurus
atgggtgtggtttgtccaggaaagctgcttcctgcattccaacctggcctcccgggcactaacacacttgtcaaggtgcagctgtggggagcaggagcaamttctgttgccatggaaaccactggcctttccctctcaaggagctctttagatcctggcctgtgatgtgccaacacctgtggtggttactggggagtttgg

SEQ ID NO: 37230 - DNA, 201 bp, Bos taurus
agagccatgaccatagaagccaggtcacctattagaccatctgtcctggcttagggacctaatctgttctgctgactctggggctgatctaaatcagaccratttttctccccttccctatataaccaaagtttatatgatactcccctcaaaatgaagaataagggaaatgtccaggaagatgcttacctggatgtagaa

SEQ ID NO: 37231 - DNA, 201 bp, Bos taurus
gaggtaggggtggtggtgatgggtggtcaaattgaatatgagtaaaaggaggaaatgtagtggggtctgtgcccttaggtaatttgttccattgctgatgycagcatttcatagtctacttggaacccagtaaaatacctcatgaaagttacaaggccttcacagaagggaaattcaccgtagcccccatccttctacctg

SEQ ID NO: 37232 - DNA, 201 bp, Bos taurus
ccttaggtgggtagaccttcataatagagctagagttttgaagttaggtcagaaggtagagtactgggagggcaaggcagaagggaaccagaaagaaggcrtggccagtgataaaccttttgaaagaaatgactttcaaaagctgtgcagctgatatgcagttataagttgtgattgtgaaatgtgcctggcagcccacag

SEQ ID NO: 37233 - DNA, 201 bp, Bos taurus
gggagacgggacagtgcaggtggcctgagacgcatcaggcaccccttgccctcttcccctgtagttgggtcagcagtgctcaggagtacaggggttcttgrggccttctgagggggtgggcttgggataactaagaatcagaggcatttctttgatccacaggagatggaaaatgcttggaatgagtacctaaagctagaa

SEQ ID NO: 37234 - DNA, 201 bp, Bos taurus
ccctcagaacacaggtcagcttcccaggacttgggtcagtggctggagggcaggcagcgggtccccaccatctctgatggccagcaaggccatgatggcaraacgatgacttgacttccagcctaaaatggggaaggggccaccagaccagctgccgtgtttgtggccctttatatgagtcgtgagctcatgatagtctgc

SEQ ID NO: 37235 - DNA, 201 bp, Bos taurus
cagaaattgacagcgctttaaataatcgaaagtaaactagttatcctcccttcatcatccttatcaataacctctccaccttcccccgctccccaatttcmccgtctacgtttccatggcattcgtccattgtatgagggacctagttttacgtttactggttactgcagtgtccatgacaccgcgctaggaactagtaca

SEQ ID NO: 37236 - DNA, 201 bp, Bos taurus
catttgcttctttctttatccaggtgtcctagaaacctaactgtctgtgagtttggtccttaggcaggttcatcttgatgttggcactttcggcttcaaayggtgctaacagtgctttcaggctacacatggagtagatgagtgtcggtcatctttctgagctgtggtagagttcagaatacttattttgtgataacgaat

SEQ ID NO: 37237 - DNA, 201 bp, Bos taurus
gcagatgctcttagaaaaaatcttgagatcaagactgtcctcatcattggtctattctttgatgaatagaggagaaatttagcaggagaaataagaacatygtgatctcagcaatatataatataatctatgccaatttttttttgtccaattgttctcagaacaaattaaaggttttgttttatttttaggattttaaat

SEQ ID NO: 37238 - DNA, 201 bp, Bos taurus
actcacagccacccacattcagaggcgcccacaattcacgactgaggagctagaaggctgaaggtgagggtggggagagtaggtagagaggcccctccttrtttttctcatggagtcattttcctttctcagggaagttctgtcatggtttttaggtgaaggccaccgtcttgtttatccttcttccgttggcttcctcct

SEQ ID NO: 37239 - DNA, 201 bp, Bos taurus
ggagtcttggccaaacacatccagtccagccagtgttcctctatgggccacccaggaaggactgactgtgtttgactctggccatcaccaaacctccatgyttctttctgactctgccttcagccaagatcatgtagattccttcccttatgacatcccaaccatggctgtctcctcatttcacactagtcatttgtaacc

SEQ ID NO: 37240 - DNA, 201 bp, Bos taurus
caaacgtgcatacagcaactatggactatactgtccttgcaaattggtcacaactagaaaatgagtatgtagttagaggcagtgctactgtcctgtgcccygatgtggatctcaaaccattagtcctctctgaaaaatactatttttgccctcactctactagatcaacactgaggagcattctaccaagatgtcagctgg

SEQ ID NO: 37241 - DNA, 201 bp, Bos taurus
cgtaaaatcgcaactatgatacatttgaaggaagtatatgtaccgtgaagctttgtagaatgggatttgacctaatcatggaggccatggaagtgacagcygaactgaaaggtgagacataaaaggaattcagtatgtgaagacatgaaggaagactgttctaagaggaagaacagcaaatttaaaggcctgtggcaggag

SEQ ID NO: 37242 - DNA, 201 bp, Bos taurus
cattttccttggcacctttgcaagatcgttctctctttactgttgtcctgagatggttcaggcagggctggacacaatcacaaacaattcatgatcaatcrtggaggtataaaattcccaaagttcacttcataaatcaggaatgcattcagaggagaatggttttgtatcccacactaggagatcctagattttagagga

SEQ ID NO: 37243 - DNA, 201 bp, Bos taurus
tccctgatatcactgcttttaccctcatctttccactattcaggattcaacaaaactgaagtaaaagtaatattaatatggccaattttcttgtaaacttsaaagtgctctaaaaataaactgtgttagaaaaaaaatagtaatataaaactctggttagttttcttctttctattttcttttttactggtttggcccagt

SEQ ID NO: 37244 - DNA, 201 bp, Bos taurus
tacttcaaatgagtaaggaaataatatgctatttcagggctattagctatatagtttttaaaaaataaagttagatctcttcttcatattatactaaaacktcaacttcttgtgtatcaaatacttagatgaagaaagaaaaccagaaaaacacagctgattatagctataatcttggagtaagaaaagccttcctaaact

SEQ ID NO: 37245 - DNA, 201 bp, Bos taurus
tttcccatagtgagaaacctgactttcattgttcttgatatatttatttatttgcttaatctctctgcatgtagctgatttcctgatactgctaggccccyaccccctctttgcaaatagacctgccctttgctgaggttggtgtcctctgcgtagcacgcagcttactttgttaggcctgactcatggctatttgatagt

SEQ ID NO: 37246 - DNA, 201 bp, Bos taurus
accatgtgaggtcctgtgccattataattcacattttaaattttattaaaaccttaacacacatacactcctgtgaggtaagtactattaatgccctcatyttacagatgagtaaactgaggcacagagtgaataagtgactggcatatggtcccctgagaaggaactgtattttatccgagcctgaccacagcgctcttt

SEQ ID NO: 37247 - DNA, 201 bp, Bos taurus
agttgtagaagttatgtaagttaaatcagtgaataagaatgatgtctaaacaatcgtcaaagaccaactctatataatggtcagtaacaagattggaataratttttggcactattttattatttcccactattctaagctccacgaaaataggaactctctctgcctcgttgtcatttaaaaaactgtttattgttgttg

SEQ ID NO: 37248 - DNA, 201 bp, Bos taurus
gttttggccaatccaaatttcatgtgaaccagttacttatgactgtgtttaacataagactaaatatacttagagtaaagctctcaggaaatggaatcttrtatctgcaacaaatgtattttgtaagtgtacattttgactccacaatgtctttctctagaaagtcaagtgctccttttgtgtattttatagcttatctca

SEQ ID NO: 37249 - DNA, 201 bp, Bos taurus
ttggtcctagaattagcattagtatatttggccaaatgtttaatgggtttgtgtgtatgtgtgtgcacatgagcacatgtaataattctagaattctgttkggtgctctttagcctttcattccctctgtaccatcctctgtaaaatttgccttctggaatgattctaatgccagtcatttccagcttaatgcaaatttaa

SEQ ID NO: 37250 - DNA, 201 bp, Bos taurus
ctttacaggttaacacaattggagaagatatgattcacacaggacaagtttcctgtcttgctgtgttcctataaagatctgactcaagtgtgaggatccartttaaaaccagcctcttgcctggatcaagattgaagagggggtggaagtggtggccgtgtttaagctttcttaaatataaattacttttatggaacaaat

SEQ ID NO: 37251 - DNA, 201 bp, Bos taurus
acctttgaaaatgatgaacaattcagaaattaaacattttaaaaagcagtattaaactgtgattgaggatactgtggagttgttttgatattactgacttytgaaataactggtagttatcaagttcgtccagactttctctcaataaaaataaataaagaaattccaaagtagctttaaggcagacgtatgagcactgtt

SEQ ID NO: 37252 - DNA, 201 bp, Bos taurus
tctttaaaatttagcagtttaatatgcttgtccatttggctccattcctcttcaaacatacctagagctcacactgttggtgggagtccagggcccatttktttttcactttccattggctttctggatcagatgtttgcttttcaaatgctcctttagattttgaaaagtatagtctctcaaagtaagatacatgaaata

SEQ ID NO: 37253 - DNA, 201 bp, Bos taurus
ataataaacatattctaaaattgaaaaaaactctgaaataatttgagcattgcatatatctgtctggcacattgaaaactgacacaaagctacagagaacygatgatgccagacttcagcatacaccattcatcttcactaaacaatactagaggccaagctaagggctatgatattaacatctactttcaacaacacatg

SEQ ID NO: 37254 - DNA, 201 bp, Bos taurus
ttggcctccaattaaaataaataaatttatattaaaaaaaaagctttattgaaatcctttgagaaattcaggtttgggtgtagaggtaggcataggtcatycatctccttgcatggccctgaaataaatctttctctgctccaaaaaatgaaaacaagttaacttagaaaaagtcaagttgatgtttaagacattatattt

SEQ ID NO: 37255 - DNA, 201 bp, Bos taurus
ctagttacatacaaaattcatgtagaatcacaattagtcacatggtagtcaaagatttcatacatcactgaaatttctggaatcatatatccattttctgrgtccaatgaatgcctgcctcatcttcattatgtcaataccatttaccattaatatgagcctaaaatacatatgtgcctcagaatgacccacttcaaacat

SEQ ID NO: 37256 - DNA, 201 bp, Bos taurus
cagcatgcgtctcagcctaagctgaacagccactcaggcccctgatacttcataatgtagctccacactaaggaaagggatgctgaggccaagggcagtgyttagttgtgagggagagagtcagtgcagacctgggacggcatcggatgtaggcaggggcagccatcactagcacttacggaggcagcacctctgaagcag

SEQ ID NO: 37257 - DNA, 201 bp, Bos taurus
aaaaatcttttgtagtttgtgagttcttacaacttcacagcttaactcttctctctgatcccatgtaggcactttatttttcacttgtttctccagtttgmtgagcttctgacccatttcaccaatacacaaggaaggagattcacttagctcccaggaacaaagtcaactctctgtgccaaacactgtacaataggttcc

SEQ ID NO: 37258 - DNA, 201 bp, Bos taurus
aagcttatcttcccctagtatgaatacaaatgatgactcttttctcagctgtgtatgactttcttttaaaccacttcacacggataagaagcagacatcamccactttatccaatcaaggaaaattatatgtaagttttgatttggaaatgaacagacaacctaagtggccaaaactatgaaaaatatacaactacttctc

SEQ ID NO: 37259 - DNA, 201 bp, Bos taurus
tctggttctcaatgacaaagaatggcctctcaactatcattttggtaacatgggaaacttagaagctacagagtatccacaaccaggatttaatttccaayattttatttcagattaaacatcacaaagaacgggattaccttgcagaacactgaagaagtaggctgggaagtaagaatcaaacaatgggaaatttgaatc

SEQ ID NO: 37260 - DNA, 201 bp, Bos taurus
tcatatctttagtgctagaaatcgggttgatcaaatcataaaagttttaacagaactttagaaattggataagccttttggattatctggtttaacttccygctcattgaagctctctataagaaaccctgcaagataatttttaaatctataaatctgtaaattaaggaaatagaacttcctgggactgatctgaatgac

SEQ ID NO: 37261 - DNA, 201 bp, Bos taurus
tttagtgcagatcccttaaggaaatacgggctaatgaaactgacttgatgatattgccaagtgttaggaatggcatttttaaaaggggagaaaatggacaraagactcctttgttgtcacttggctgtgatttgtggtattgattctggcctttggctgaatcttgaactaagtgcagcggaggtccaagtaccttaacct

SEQ ID NO: 37262 - DNA, 201 bp, Bos taurus
tatctatactaatttcaatgaaaacatttgagaattaacatgatcttaaagagaaaaatagtctttgagactacagtagaacacacacagaccattgtttycatgggcactcctgttataacctctccccaaagaaagacatgttaagttcctatcccgtctactgagagaaagcaatagattaagtgctaactcaaattt

SEQ ID NO: 37263 - DNA, 201 bp, Bos taurus
aaggcacatacttgaagtctaccagtacatcagagtaatttccctcataataacatatttacattttaatccttgaaacaaccctttgaaaggtgtgactrttgttcccgttataaagacaaggaagccaaaatagggagggtaaagcaactcgttcctccagcttgttgcctacttcataaagcttagatatgctgccta

SEQ ID NO: 37264 - DNA, 201 bp, Bos taurus
tactctttgcgactccatggactgtagcccaccaggctcctcagtccatggaattctccaggcaagagtactggagtgggttgccatttccttctccatgkaactgctaggaagaagcaaaaatagtctacagggaggagacaaagggaggcaggacaagggtagaaacaagctgcatcatctctttccagtcataaatat

SEQ ID NO: 37265 - DNA, 201 bp, Bos taurus
gggattgaactgcatctcttttgtctcctgcattggcaggcaggttctttactgtgagtaccacctgggaagcccacaaaacagagtacaaatctcaaacrtttccgggtgccattgtgcctttgatagagcaaaatcaagtctccaaaatataagaaaggcctggaaggtattaaggatcaaaattagcatcttttttgt

SEQ ID NO: 37266 - DNA, 201 bp, Bos taurus
aggcttgtgttttggcctctgtttagctgtgttaggcctatgagtgacagcttccctgcttgaagcacacagaaagcacagccttcctcattcactgacargactgtggccttttcacacgttccttccacagcagtgtttgtccccaaacactggaactccacacaatggcattcctacttcaacacccccaccaacagc

SEQ ID NO: 37267 - DNA, 201 bp, Bos taurus
ccttcccagaaaggtgcaccctctgccttgcatgactctgtgggagttttgcttcctcctgtggcttctttaaagaaatcccactgacttaggcctccaaytgactttcatctgcactctcacattctactgtttctgtgcagctttactatcttctgcagaactctgagatgactacccagactgttcatattatctcct

SEQ ID NO: 37268 - DNA, 201 bp, Bos taurus
ttctaactttttttctttttcacttacaagggcagagctaagtagattcaacagagactgtatagttcacaagcctgaaatatttatcctattaactcttyagggaaaagcttgccaatttctattttgtatgattatatcttgtgttttccttaatttatgtcatagcagtaagacatgttagaagactgagacaaactg

SEQ ID NO: 37269 - DNA, 201 bp, Bos taurus
tcacctaccttaatccatgcagcactgtggattaaggacaccagtgtgccccaggattctcaaagaggatcctggaaacttcttgtttcttcttttttgckgtctttactaaattctattgggccttagggggatttgcatctgaaatgggcaacctggtgtttttctcaatgaagacatcagatcaaagttcagttagtc

SEQ ID NO: 37270 - DNA, 201 bp, Bos taurus
atgagtgggtggttctgatgatgagtaaagtttctgttaataagaaggacctgacaatcactgatacactctgtaaagcctcctgatttaatagttagctraacaaacacttgcaaggttaaaatgagaaatgtgcaaatgtatggtgtgattatttctaatatattttattaaaaagctccatgtgggatatttttaatt

SEQ ID NO: 37271 - DNA, 201 bp, Bos taurus
taaaaggaaacatatgttttattatgctcttttagattggatatgaatatgtatggttaccataaccatgggccaagaagaaaactggttatggtagatayaacattctgatactctctaactcaaaggacatggtattattcagaaccatatataaatatcaaaagcaaaatgtacttatttctagatacccttttcaaa

SEQ ID NO: 37272 - DNA, 201 bp, Bos taurus
gtctcagctctgggtgacagacacatgaatagtaaaaccccatcataaaattattctgcccaggaggactggagatggggttgtttggagaaagtagaaaygatgggccaatggactccagagtccagaggttcaaagccagagcaggaagagccttgtgtgaggttcagaacttgggagcagatttcaactagcagagaa

SEQ ID NO: 37273 - DNA, 201 bp, Bos taurus
tcccggtgtttctgttgctgtctttttgatgtcacaaagcgaagttgataaacacattcaagtcacaattaaaaaacattttcactgaccagttgccaccracgatatcatcagacagcttcgttgctgctgtaacaatgcgtttaatggtgttgatgtgcaggcgagaaggtgcttccctttatctggtccttacctcgc

SEQ ID NO: 37274 - DNA, 201 bp, Bos taurus
tgtttcaaatacttttgcatgaatatgtattatcttcatattttttaaaaaatgttctgaaatcctgggcaaaaataagttaggaggccttctcgtttggyccaatgttttcatgggacagtacgatgggccctggtgacaacactcttctccctgggggtgctgggccctgtgggggcccccaaggccatccaacttggt

SEQ ID NO: 37275 - DNA, 201 bp, Bos taurus
gcgcaatggcaatgcgaggctctatatgagtttcactccagatgaacttaatctctggatgaaaccacccagacccaggggctgcctggcccagggttccrttcttcccacactgggagaaacaacataattagaaatgcaatgagatgaggtttctgttcctctctccagttacttcctccccatcatttggcctgggac

SEQ ID NO: 37276 - DNA, 201 bp, Bos taurus
cttattgataaaaatataattaaactaagatatatggctaaaacttatattcagatatagtatcttacaattctgtaaatttaaaaagggttggttttctrgaagtttttcttctgtcaaggttacaaagtagaacaaacttctatgtctttccacatttttcaacaactgaaaccatggagccattgtaatcagctaagt

SEQ ID NO: 37277 - DNA, 201 bp, Bos taurus
gttgatctgtctggcttcaaaattcccatcgtaggcctgtcctctctattatgtgaattctgattctgacgtgttgtctctgtgttcctgtttcaaaactrcctaacactgcaaagaagggccatcttgattaagctttcagtttttagttgttaaagttactttgctggaaaggcaagagaagcactatcaaaaatgctt

SEQ ID NO: 37278 - DNA, 201 bp, Bos taurus
agggtctcctgcattgcagtcagattctttactgtctgagccaccagggaagccccatagactttttgtattgaacactaaaaaaaaagaaaaagaatttytaattgttagattattccaagttataatattggacctactcttttttaggatttctttttggttggaaataattcacagaatctgacatgtatatatcat

SEQ ID NO: 37279 - DNA, 201 bp, Bos taurus
acaggcaggctacagtccacggggccacagagaggcagacacaactgagtgactgaccatacacacacacacatacacacacatacacacatcactacttyacaaatgaggaaacaggcccatagaaattaagctacttgacctagatcacacagccaaaggggcacatttgaacagttccagctcttggtctcaccccac

SEQ ID NO: 37280 - DNA, 201 bp, Bos taurus
tcttttctatttcataggtattcctgcgacacatggtaaacccactagttattcaataagggtagataatacagttccccttgtaactcaggccccagccrtgcagccactacagatccgaccaggagttctttctcaggttggtgataataattcattatttttgcttatgtgctgtccttctcatactcaagtagaggc

SEQ ID NO: 37281 - DNA, 201 bp, Bos taurus
atatgactgcagagatgagtggtaccatccttaggcctgggcctattctggccctccacagtctgcatgtctccatggggcagggcctatgtggggccaargagccatgccctcccttctagaatctagaatctgcatcatgctgtgtatacccaaaccctggaattccctgtccacatctgcctccatggcctatgtggg

SEQ ID NO: 37282 - DNA, 201 bp, Bos taurus
ggctggatgaggtcccagctttcaggcctctcagcaccatggctgtgatcagcagaaacactcatcagccttccaaaagtggggttctgttggccttgtcrtgtctgtttcaacaaacagagccctctccatttataagggacacttgaccacactgagatttaggggaatacactatagcagacactgctggggccctgc

SEQ ID NO: 37283 - DNA, 201 bp, Bos taurus
ggtgatgagtgctagagctgagaggggccaaagcccaacttcggagcctcagcaacccacaatacatcagtccagggtcaacaagccccgctgcactccarggccagaccttcctccatctgaatgcacagtcctcgccgtgtcaggccacctccccacaggcaaacaggccagggtcagggctcttcggccaccttgtca

SEQ ID NO: 37284 - DNA, 201 bp, Bos taurus
aactaacaaggccactatttgccaagaagagtctgagttatccattaaccaggggtgatctatcagtgcctggaagccacacaaaggacaagggttcggtsagcctgggagggcccacgatggggcccacgttaaagaaatgtcaacacagtgatgtaatatcctggcccccaacttccttcccttagaagcttccggttg

SEQ ID NO: 37285 - DNA, 201 bp, Bos taurus
gtaaattcaggcagtgttggggcccgtttcttaatacaaatcactgtagcttgcattcctccgaggtcagctctttaccagctgtaagtggagctcacctyctaatgcatttttctcacaatactctgcaaggttgatttaatcgactcatttgtttttatgggagtgaatattgaactctatgagggagatttgattgtc

SEQ ID NO: 37286 - DNA, 201 bp, Bos taurus
atcatcccaaaccaaaacaagttccagcattgagcgcaatacatggcacacggtgcaggcacttttccacaagtgtttgctagtgacaatgggtgaaggayagggttaattatctcttgccttgtcttgcgacagatggcgtgtcatgtacgcagagtcagatatttatgtctccaggaatcctttcacaagagaggtgga

SEQ ID NO: 37287 - DNA, 201 bp, Bos taurus
agaggccactgctgccggtagtgtgagcccaatgcaatacatatgaaagtcaaccttagaaaaatggcaccagtaacttgctgaaggaaggcaatctccayatcaattaggccctttacataatctctgatttgtggttacacacattttaaaaacacaattagttatgggccagagctaaagaagtctttgatgcataat

SEQ ID NO: 37288 - DNA, 201 bp, Bos taurus
gtgttctcaataataggcactactaacatatcatcgtatctgtaagacaaaacatgctcctttttaaaacaaaagaattcatatataaaactgatcacttyttcaaataataaactagacattctctttatatcggagaagccactccaaattatgaacaagatgttgcatgtcagtctgtgtatcctgcatgaacaacta

SEQ ID NO: 37289 - DNA, 201 bp, Bos taurus
cacatacacacacacacacacacacacaccttccgagtctacccagcagcttcatccctacagcaatttagcccacgagggcggggccccagttaatgcawgtgactctctaaagaagtctctactgaaaggtctttgctgctccaggcttaggggactggaaacaggccttcacatctattattggaacgccctcaggaa

SEQ ID NO: 37290 - DNA, 201 bp, Bos taurus
tataaatgaccatccaagtgaaaaaggcaagtttagggctcaataaataattaacaaatgagtagatgtgcatgtgtaaaagattaccaggtggggctttycccattgtctctgtattctgctaaagcccaaggtttatgcttgggtgatgaagacatacccgttctaagagaagctctagacacacccacacaggtcttc

SEQ ID NO: 37291 - DNA, 201 bp, Bos taurus
gactcgtgaacccttggctattccttagatgataatgatcatggccacaatagcaaacactgatataaggccttaccacgggccaggcgctgttctaagartgttacgtgtcatgatttcatttaatccttttgatagccccataggggtagaggctgctcctggccccattttccagatgaggacaattaagcacagaaa

SEQ ID NO: 37292 - DNA, 201 bp, Bos taurus
tcctagactttgctggatctgagaccatctcataggttggtgattagagtaaggactggctgtccttaggtaaggtggccagtccccccttgaccagggakatgggagtcacagggtgccacggcggcagctgagggcaaagaacttccagaaaggagttggcggcatagcatagctcccggaagtgtggccatccagggc

SEQ ID NO: 37293 - DNA, 201 bp, Bos taurus
cgctctatgccagtttagcttcccatggcagttgggttttttttcttgaagattttataaagctgagtataaaatgggaatgttttcataaatgcttaagyatctttagcgaggctaatttatagaatttaaatgttcctcttaggcagtttaaacccaaattccccagcagcagagactggaggctgagaaacaggaaac

SEQ ID NO: 37294 - DNA, 201 bp, Bos taurus
cccctgagccttgaccactgtctacccccctgcccagagcctatacagttagtccaccgtacacacaccctgaaatttgccttaagcctggtaaatgctgmagaggccctgggagaaatagagtgaaacctgagttgtctggggtctttgcagagattttagtctgggtatatctgagtctttgacggggttcactctcag

SEQ ID NO: 37295 - DNA, 201 bp, Bos taurus
atgcaagtaaggtatcattattatgcccttctacagatagggatgctatctgtagagggtttgagaggaggtcctctcacttacccaagtccagaaaaccrggaagagttggctttcagtaaggacccccaattctgtggatcgttaaggtctccatgaaaacctcaggccagctgcatccctgctgaagcacccaggatg

SEQ ID NO: 37296 - DNA, 201 bp, Bos taurus
gttccagttttttggccaaaagacctgtgggatcttagcttccagaccagggattgaacccacaccccttacattgggagatagagtctgttaaccactasactactagggaaggccactgcctcattcttctgatcacctttctagttccagcactgtttcagctcagtaactgatacaccgaggtctgtgcagtaaccc

SEQ ID NO: 37297 - DNA, 201 bp, Bos taurus
tggatggacagtctcagggcccagcagcctcagtgcttcgctgaccagggcagcctgtttccctgggaggagggacctggattcttccttcttctaacacygcagctgggcctgcaaaatctgctccccctgccagctggaaagttggcatttgtagctggaatatctttttctttcagtgttgtttttggggacacagca

SEQ ID NO: 37298 - DNA, 201 bp, Bos taurus
aaaaaaaaaacaaaaaacaggccaatttgtcagaggccaggcccacatttctacctttccagtttcccaagtttccaggctgctgccctggctcagttagygctcgtttcttccgcacaaaggcccgggcctcccactcatctctctccattgtggctccagggggagggtcctttgccccaagatacagtaacttgtcct

SEQ ID NO: 37299 - DNA, 201 bp, Bos taurus
ttggaaggtggaacagatgtctccagtttagaaaggatatctaataaagtctgaaacattggatggcacttctcagtcctcaaactccctcatgaagacaygatccttaggtcttcactttcttgaggaagggggagaaggcactcattaaatattttctgggaccagttagcagtagcaaagtagggagttccatgtcag

SEQ ID NO: 37300 - DNA, 201 bp, Bos taurus
accagtggaaaaaccagagctcattagcctctctcttcccataagcctctccacatagcaaacttgggcttcctcacagcttggccatctcaggacagtcmgaccagttagatggcagctggctttccctagagcaggcattctgagagagaatactgctactccttaaaggccaggtgaagcatcacttctgtctttttt

SEQ ID NO: 37301 - DNA, 201 bp, Bos taurus
cagggaataggaaccttgcacataaatacagtttgtggctttgggattccacagctgggagctctcaacagccactgtgtataaatatgcctatggagttkagttctaaataatgacagtcctacattcaggattcacatggcttccaggacctcagtcagttcagtctgactctttgggacccgatggactgcagcacac

SEQ ID NO: 37302 - DNA, 201 bp, Bos taurus
ggtggcgttgtaaaatggctagcaatttgggggctttgaagggcccttaagtgatgctgtcttcagcacttcagatctatttggcatcttcaaaggatatkcctgtccatccatctggcctgatgtgactaactccctgagcctcttcaaaagaaagggcatctagttcagtattgcttcccgctgtggagcgtcttctta

SEQ ID NO: 37303 - DNA, 201 bp, Bos taurus
gctcttggtttctgttactgacagagatggtttaatgttggccaccagctgtggccgtctgtcttgttcctaatccaatttagcaggccagcactatgackggggatgctcaccatcccagattagaagcttacacatgaacttattcagcttctgtacattttaattctccagagacaggccaaacctggcaatttttct

SEQ ID NO: 37304 - DNA, 201 bp, Bos taurus
aggatttagttgcagtgtgagagaactttgttgcatcttgtggggtctttttgctggagctgggctctctggttacgacacgtgggctccagcctgggccygtgtagtagttgtggcatgcttagtttccccgaggcatgtgagatcttagttccctggtcagggattgaacatgcatctgttgcattgcaaggtggattc

SEQ ID NO: 37305 - DNA, 201 bp, Bos taurus
gcaagttggggaatgacgaagcgtctccagcagacgttcccccgacaagagctcacggtaggacacaggtgagctctggtcctttcttgggccttgaggcrgagctggtttgtgagcacagttacccaggctcctcggggagttgcccggtgctgctgtgactgggcctgcgataacctacacctcacccaggagggtgtc

SEQ ID NO: 37306 - DNA, 201 bp, Bos taurus
ataagagataacaactgcaaagaatttagtgtcttgaaaaaggcagaggaaaagaaggggggggaaacctagtctatgtacaagtgagttgatttaataayggaagataacctctttcactataatctcaaagacttcctgtttcttcaatcatttgttatgctatcttgcctattttttttccacttctgtttcccatat

SEQ ID NO: 37307 - DNA, 201 bp, Bos taurus
ctaaataataatagtttagtcataggcatagctaaggatatttagttccttttcatgagctatagataatattctgagccatatcctgtggactgtattayaggtactgacacaccccgaagcagaaaaagttaactacataatgacaagactgtagccgtgacttacgttcctcatcattctaagaattgacctcaagga

SEQ ID NO: 37308 - DNA, 201 bp, Bos taurus
gtagtataatccaattgcagaggttctcccccaagaagtgaggattctgaaccccacgttaggctccccattccaggtatcttgccctagaaagatgagcraccagaatgtctgactttggaggccagtgaggtttgagtacaggtgagacagagatctttagggaaaatagacccctctcttaaaggacatgctcaaaat

SEQ ID NO: 37309 - DNA, 201 bp, Bos taurus
cccttggctaagaggagactctgccttgggcccactggtgtaatagtaataaactgcactccactatctgcattgtcctgagtgagtttgtttcccagaaygtgtggccacaacagtttaacaggtcttaattgttggaccattcatttgctttcttcctttgtttaaaaacaagagtcaaggatgtgcactgaactccct

SEQ ID NO: 37310 - DNA, 201 bp, Bos taurus
atctgtggactaaaatcaaggtgttaagaggcctctaaccctttctgaggactccagggaagaatctttttccttgctctttccaggttacagaagctttycacattccttagctcatggcccttctcctcaatcttcaaattagcaaatatgagtcaggttcttacatcacattgacctaatctccccttctaaaccctc

SEQ ID NO: 37311 - DNA, 201 bp, Bos taurus
agtcaccctctgtgttttttcagtcttttaagtttattgaggctttcacaggctaagtcaaagatctctcctggtaaatgttacactgcactcaaaaataygtcggttattttcaaatatcttctgatattgatttttagcataattctacagtgataagagaacagactctgcatgatttcaacacctttagaccatgaa

SEQ ID NO: 37312 - DNA, 201 bp, Bos taurus
aaaacttaccactcattatcaaatgaaggatgggggaatgttaataatgatttcccttgtttttgatatctaaaatctccctctggtcttttttcttatcrcatacaacctaataacaggacagattgtgtccatagccatacatctctgaatggataaatgaaaaaattgtgcatgaagaaaaacaagtatagtttttgt

SEQ ID NO: 37313 - DNA, 201 bp, Bos taurus
taccataggaaggaaaaatatcctatgaatcacagaaagagacttctcagagcaaagatataaaatcttttcagaaatattaataaatttaatagaaacaygacttttgaatattccaatgaacatggattagtaggtattaattttgcagtcaaaaaatagagaatacgtttatttcaagttcttgtggctcattttcca

SEQ ID NO: 37314 - DNA, 201 bp, Bos taurus
aaactggatgggaccctcaagaaactcatcctaaggaccactcttctaccttcaagaaacttacttgcttcccagttctgtagaaccaccactaccaccayatcactcaaagagacacagttgataatgcttgcctgagagcattctagaagttgtatgaaatcctgtatttaaaagctatttcttttttgttattgtttg

SEQ ID NO: 37315 - DNA, 201 bp, Bos taurus
tctatacattaaggttcagatcacctgccatctataccacctacactgtgcatgaaacatttcaaaccagagctaaatatcagctacagaagtcatttcamgttctcaattctcctttgctgaacacaatattattttgaaatgaaagtctgattcactcacatatgtatctacttattttatcagcgacacaatgcctat

SEQ ID NO: 37316 - DNA, 201 bp, Bos taurus
agaatagaaatttaaaagaggcatcactctggaagtgcctaggaaataatctattcacttctgtaagttgtccccaatattgatagggttgaactccagaytgaataactaaatgttgtatagaaatgacatattctcattttatagtacttgtagaaaatttgaaaacatgttaaggaaagaaagcaaggaataaaatat

SEQ ID NO: 37317 - DNA, 201 bp, Bos taurus
taaccccccatgtgcggtttcttaggttaatgcaaggattctcgtaaaagagcaagtcttgtacacttttcctcccattctggtggacagtcggactgatrgtctatgcttgctagaggtgatgatgagagaatccattcttttgatagatacataaataaaacaatttttctagtaggatcgccatggcttaccaatcca

SEQ ID NO: 37318 - DNA, 201 bp, Bos taurus
tcacatctgttgatgctaattcaggaatgactcattcatctgcccagttctctcattgtattatgttactaagaccattctcaagttcctcagctgacttytgcactcatctttcttcttatccataccatcccctctctagtacctgttagtttccgaaaaatagactggtgagaaagtttaaaagaaacagtaaagaaa

SEQ ID NO: 37319 - DNA, 201 bp, Bos taurus
gggccggtgatttagctgtctgtcttcctgctattctaacattgagagaaagaaatctgaattctctagaaactgggaaaactaaaggctacttgtaagayagcttacagaatttgacattatatcacatgttccctccatccctgtcagatatcttccaaaggaaaaaaatattttggggagaaatattcatatttaatt

SEQ ID NO: 37320 - DNA, 201 bp, Bos taurus
cataatgctcccaaagtgtacttccaccctatttatttcagtgataaagttgagattccctgagaggaagggaaggtaaaaatggagagagactgggttcytatttcccaagtacttaatattccatgcgtgaattgttcatctgtccctattctcttttccctgaatcctaaattcattttacactcccaagacagagag

SEQ ID NO: 37321 - DNA, 201 bp, Bos taurus
aggccaatcgtgagttcacacagctttggtgggaacagcagcacatctcagtgatgtgaggagcccaaggagtccttgtccagatgggattagtaatatcwctgtaatgcaaatatggcccagctattgtaggaggctgatttatatctggaaatgactttcctaactccatgagagaagtgaaacatttatggtagtagt

SEQ ID NO: 37322 - DNA, 201 bp, Bos taurus
tatgattgagaacgcagcacagaacactgactcacctcctcaacctacccatattcatcagccagcccagaaattgtgcttttcaaacacaccatgggackggggaatcctcctgtaccctcagagccactgtaaataatacagctatggaagaaggcacactctttccaaccaatttctgatttattccaggacgctttt

SEQ ID NO: 37323 - DNA, 201 bp, Bos taurus
cctttcttctttagcagggcatgtgactgtaataaagtttataattcccagcctcccttgcagataagtaaattcatataaataagttttaggtaatgtgmtatcaagggaggtgaaatgcaatttaagcaggtgttattatgacataaatttcattgcctttcttttttttttctgggaaaaaaaactgactgatagctg

SEQ ID NO: 37324 - DNA, 201 bp, Bos taurus
tgtgagttcttttcctttcccttcatctcttcttttcctctccttccacaaatattcagttacctattttatatcagataatgatggcccctgagattagkagcttgtaggctagctgaggaggcagatataattaaatagtcccccaaaggcttccaagtcaagatgtacattacttagcgaaaggccacttctatcctt

SEQ ID NO: 37325 - DNA, 201 bp, Bos taurus
tctctctccaagaattggtaattctgatacattttgcaactcaaaagagatgttctttctttgtaattcacaaaacaaattaaactcatctttccaagcargtaaccatcctgatttgaagcaattccatgctcatggttcttttcataaacttatttgaaaatgcttttcaaaggggcattagtgttttgcgtttacatc

SEQ ID NO: 37326 - DNA, 201 bp, Bos taurus
taaatggacctgaaatgaaaattctgtcttatttaagaatactattcacaagtacaaagatgtggccttgttttccattgcctggcccttgttctctttcygactcttcattcaattatgaagagcacattccaagtagcctacatataaaaggaatgtttttctgattaaatatcgaacattaagatggtcaggcctatg

SEQ ID NO: 37327 - DNA, 201 bp, Bos taurus
gcgtcttgaaaatgttcttctctctagtaaattgaatgtatggtttttatgcactagccacatttccctcctcatacttagaaatccttttatgttttgcrgactctcaagcattttcaaaaaccatccattcaaactgggactgttctggcttgtcttgtgtttccaagaatatacagttattctagaaggctttgattt

SEQ ID NO: 37328 - DNA, 201 bp, Bos taurus
aaccgttcctggtaactctactcaacactgctcactttgttgacagcccatggtgttaattatacagaatgtgttaacacatttatctcttcatcagaggktctctgctgggctcctgtgcatattgccttattaacacatctgttaaattcctgtaagtcagggattttgccttatgtttcctctcggtctcccatggca

SEQ ID NO: 37329 - DNA, 201 bp, Bos taurus
aagtagaatcaaaagaaaaggcaaatcaagaaattagatcaaagagtcagcagaggaccagatggtgtagagcctcacaggtttaagaattttgtcttcaytctgagagcaagtctttacaccactgaagaagtttccctatgaaggtaaattcatcttacttttttaataggatcatttcagctgcctgcttagaagatt

SEQ ID NO: 37330 - DNA, 201 bp, Bos taurus
acatgtatacgctccaacactaaggcaagctgtttaccaagtgtccacaatatactactcattctgaagaccatcagatttaaagcagcttattctagagktctgcaggtggtgataactgataattccaggttccgtggtacgtgcaggggtggggagctgtcacgtctttgaatggtgagacttctaggtcctagagag

SEQ ID NO: 37331 - DNA, 201 bp, Bos taurus
tggtccacatcaaaatattatgctgctgtcattatcttatcctcaccatcatgcttatagttattattattgaaataatcaatggatttctgagtccccartagcacttttttctcagaatcctcagtccaaaacaaatacttcataaatgttgtcagttttttattaaaaaaaaattgcacagcttgggaactcaaacag

SEQ ID NO: 37332 - DNA, 201 bp, Bos taurus
ctcctttccttcccaactcctagttttcaggtaaggtgtcctgatcatttttcttcacatatccccttcatcttatccatatgattaaaaagggaacagtygtattttttctggctggactctgactcctggatgcgatttatagacaacagacagacaatagacactccagactggattaatcgaaagtcatccctgaaa

SEQ ID NO: 37333 - DNA, 201 bp, Bos taurus
cctgagaggaattcaggatgaaagccgggatgaggtgctctgttctttggcaaaactaccatttgatagatatgtatctcgggataaattttaatgaacayagatccttgtatcttcccatacagaaagcactaaaatcattcactgagatatctgttccttggaccagcattaccatgatgtatgcttggctgttcatat

SEQ ID NO: 37334 - DNA, 201 bp, Bos taurus
gggaatgccaggttcctggggataaagaaaggatgatggcagggaggtacccagggagcctgctgatgctcggtaatacttgttactatggctggggaaayggaaaagtgcagtttcccaacctctgaggcaaaccggctaaagacaatggaagttttctaggaggcaattgagtcttcgtaggcttgagatatttatgtg

SEQ ID NO: 37335 - DNA, 201 bp, Bos taurus
aatcttaggggcctgtactgtaactttcctaccggggcttggcagagacaccacatggcatctttgttcagtacaaatacctcagtgacatgagatcagcygagccatatggctcaagtggcaaagcaacagcctggatctgtgacaaaggattttcttgctctgagcctcactcaagataagtagcccttgacatcaccc

SEQ ID NO: 37336 - DNA, 201 bp, Bos taurus
cgcactgctttagaaccaccgcagggcctatggcagaggttctgtaatgttctctctgacactacagttcaggagactgagatggcacagctgaaaagtcrcatggccaggatttgaacctaagcactgagcttctctggtggctcagacggtaaagaatctgcctgcaatgcagcagacccaggttcaattcctgggtcg

SEQ ID NO: 37337 - DNA, 201 bp, Bos taurus
tggttattagaagtaataagtactcagtacttttttttttaataagtatgaccccatgatgtaaacaatgggcagacattagcagagggccgtgaatggcrctgtgaggagacaatacggtacagcagaagttacaccccaggggagttaggagacagccatcctgcttcacatgagactttcctggtttagtactgaaag

SEQ ID NO: 37338 - DNA, 201 bp, Bos taurus
tccttgcatggatactccttagtcttctttcatctcctcactgtaagccccaagagggcaagaatcttttctgcttttgcccaccattgtgtcctttaacmcttaaagttaacagtgcgtgtcattcaacagttgagatatctatgaatgtgttcagtaaaaaggatgaatgaatgaaagaaggtcaaggttgaatgttgg

SEQ ID NO: 37339 - DNA, 201 bp, Bos taurus
tgtgggaacaaaatagaagctcttgtgttataaattttatatctgtgcttgaagtattgggaataaacactgtcagaagaactaagacccctggggtggaraggaccacctatttgtgccctgaggggtgcttaagccttcccaagggaaccctctcaatcttaatcttttccaccactcccaccggccccgataccaaga

SEQ ID NO: 37340 - DNA, 201 bp, Bos taurus
aaaaaccctcaccaactcctcccctcctacttcctaatattttaaaatatccttaatctaaatgagcgatacaaggtccaaggaactgttttgtaaccatygcctgtgtatattctgcacaagtgaatctgggtttgaaatttactattacatagcttgatgtttcaatcttgactgttcaatatgaatacatgtaacttt

SEQ ID NO: 37341 - DNA, 201 bp, Bos taurus
tccccgctagtggactgactctggcctctgccgtctgcaagttctcaggcttccttccacccctggggtcgcgcgccgctcggggagagtcgcccagcggkgagggcatcgggccctggggaccttttctggcgctctggctttagaaaccggattcattatttcttccctggtgcctctcaggcccacgcgtcaccagcc

SEQ ID NO: 37342 - DNA, 201 bp, Bos taurus
agtaaaaagaggtcagcgggcctgacatccgctctccacgtcactcaagggcctcgttcgtgagactgtctcctcgttttttggtccaggggtggaagggragagtctttcacagccccggttgctcgtgtcactcctttcagaagaagtcgaaaaccctctgttctcgaggtcaacaggtgtttgtcttcctgtgatata

SEQ ID NO: 37343 - DNA, 201 bp, Bos taurus
ttgtatgaacagtataaattacatatatgaaaatcagatgttttaaggtagataaactaaaaatgcaattaaaacgtctaaacatttagagatgcttcgamgtattttacgggttaaaagaattaaagaagtagttactgaaattatatatagaatttgttgtaagatctgcaatctgtacattctagctttgtcaccaat

SEQ ID NO: 37344 - DNA, 201 bp, Bos taurus
gcatcgaacccaggtttcctgtattataggcagattctttaccatctgagccatgagggcagccaagatgtatatatgtatccggagtccaagaaaaaaawatatatatgcacttatattaataaatgtccagagacatttggaagttatctgctacagttgatatttataaacaagggaccatggaagttccctggtggc

SEQ ID NO: 37345 - DNA, 201 bp, Bos taurus
gggccaatattctggtttctctttagattgtataaatctttcaccttcttaaaacatgtggactttacaatcatttcaaagttttctatgagatggaaagyaagggaggaagggcccttgaacatttaatgttaatcatatacttcataccatatataaattaatgttcagagtttgttgtgcctctcaaggcctgcacaa

SEQ ID NO: 37346 - DNA, 201 bp, Bos taurus
agttggccagtgattacgattgtttgagccccaaagaaaccttcaaggaggccaaactatttaataccttcttcagatgtagccacagaagattggggaaragagaattttccagaactggactggccagattagcttcctctgccagagcaagtcttgactgttcaggccagtaggatttacctacctcgaaggcagtgg

SEQ ID NO: 37347 - DNA, 201 bp, Bos taurus
ctgtgcggggccccttctttggggctggaaggggatcaaacgttctgggctgagcgattctgaggaaaccacccagcatgggagaacctcaaggctctgcrggggccctgccttcctcccctgcagaaccctagcagggtctgcccaccgtgcccctaccattctttggcaccgagcctcactttgccctggcccacccag

SEQ ID NO: 37348 - DNA, 201 bp, Bos taurus
atgcccacatctggacgccgactcttcggggccggctgagcgtccacctgcccctctgggcgccatgaccggtgccccttctccaccccctgccctttctyatcgctttctcctttatccccagaggaatttggcgtattgagttacttcatatttcttctgaactctccttttctctagctttaaagattaagtattttt

SEQ ID NO: 37349 - DNA, 201 bp, Bos taurus
aaagcagacctaatgaggctcacagagcctgatgactcgtccaaggtcgcataatgggcaagttgtgtaaacaagcaggaacccgggtcttctacccacaragtgtcttgactggcttatgcagtattatgggagccattgagcctcctccaggctgaaacatttccactcttctgagcatatggtacaagcttgagacaa

SEQ ID NO: 37350 - DNA, 201 bp, Bos taurus
aatccattaactgcagtgaaccaagctactagtctgtctccccatcccgacctgaaggcagaggctgtgtccagggcctcacagaatcccccaggaggccrggaacagggacaggcaaagtctggtgaggagctggaattaggcatttcagtccccttctctgtgaaaactgggcatttgggccaggaggcgtctggcgtc

SEQ ID NO: 37351 - DNA, 201 bp, Bos taurus
gtctacccagagcctgcaccccaacccctcctctatcatgcttcaggtatctaaaaacctagatagcactgcctaaatggcccaagcatagttttaggatrtatatgagcaacttctccaggtccatccagggggacaacatgcccccctctgcacccctagagatgtgactagtggtagctgtaggcaagttgtgtagac

SEQ ID NO: 37352 - DNA, 201 bp, Bos taurus
cttgcatcagagctggcgcaggaggccctgccagcacacagcagcctcttttccagatggtccttgcaggctcagctcccacaaatgagacaaccgggggygaatggcacaggcctggtgatccagctccaaccttcttcttgtccaaaagggccccacctgccacctgcgcccaggctccctcttggcccactccatgcc

SEQ ID NO: 37353 - DNA, 201 bp, Bos taurus
tcgcaaaagagtcagacacgactaagcggctaaacaacaccaacagggagaaggcagtttgtcaaatgtgatgttcgcggagcctctgcctggccgtccarcttcgaggcatccaggctgtggaagtgcttgaaaacatccacacagaaatgagtgcaccaaggggcccatggccacaaggtggtaacagccagaaatgga

SEQ ID NO: 37354 - DNA, 201 bp, Bos taurus
agggtcccatgactggctcatggagcgtggatgtgaatgagggaggagaaagagcacatgaaggcaggagcgtgtggataaagaagcaggaaagggtgcgkcagcatccggccttccccccagtgggtgacacagaatgctcaccctgggctctaaagggctgtgaagcagagtgtgtattctgcctccctttctggagat

SEQ ID NO: 37355 - DNA, 201 bp, Bos taurus
agaaactggtttgaggtggggaggctgcggtgagttgtctggtcccctttccctgggccccactgcccacgggtctcccacctgaggccggctggcagccrggcagctgtggacactctccgggacacttaaggattcgccccctgatttgtcggagctgctctcctcattgtgattgaacaggtacagaagtggaaccgc

SEQ ID NO: 37356 - DNA, 201 bp, Bos taurus
cccttaggatttctggtggattggttccaggaacccttcagacatgaaacccacagataagcaagtccctcatataaaatgccatagaagagtcggccttycagatccgtggatgtggagagctagctgaaacaactttaagtccgtcaattacttactcaaattctgtgccctgaccctgccccctataggccttgtgaa

SEQ ID NO: 37357 - DNA, 201 bp, Bos taurus
tcatggggtcgcaaagagtcggacaggactgagcgactgaactgaactgaagtgctaaacaaacaagatgtttattatcatcaatgttatcatgacacctyatatgaatcaataggcctggaagggatcctaatcaggatgaggaattgatgctgtgagtaaaacaccaccaatgaaaataacaaaatgcgaatctctggg

SEQ ID NO: 37358 - DNA, 201 bp, Bos taurus
gcttaggcctttgatatcatggtctgccccacatctaagagttaagagttattcttgccaggcagctgtttttgaagttcctcggaatgttaagcagtgcrtgaggccccattcaagctcttgatcagggaaatggagagatgatcatcgtgaacttaaagctggggctctgggatcagctgctgcctgcctacaaaacct

SEQ ID NO: 37359 - DNA, 201 bp, Bos taurus
tatatatctaagaataagtggaagggcttaccattgagactttaggaagaagaacagagaggttcagggacttgccccaggccacacagtgacctcaggtycaaaggctctttaatcacgcggtcaaggatcagtgatcttagtggcttagtcaacaagatgtactgagcactacaggtgtccaggccctgacctgggaac

SEQ ID NO: 37360 - DNA, 201 bp, Bos taurus
agagagctatgaacagattttctgcctatgtagctccaaagcccttccaggggtcacgctgcaaccttggcctcattagcatgtgacgctcaccaaccagmtgggcccatctggtttcttattaatccaaaagtgagatggagggagcagccttctagggaaccagcagtcttggataaaacagcctgcaagcatgccaat

SEQ ID NO: 37361 - DNA, 201 bp, Bos taurus
ctctggggacctcaaacagccaggaaaggccagtctggtctcttgaagcagaaaggagccaagccctaagaaagcctgggattccatctggtaaacccttrcccctactccccaggcccccaccccctcacctgcctcctggccagctcctgccccctgcctctcactcctcacacgcccccacttcctcttgctcatgag

SEQ ID NO: 37362 - DNA, 201 bp, Bos taurus
tccatgggccacccagcctttaaatgacagagcccgatcggagtccaggtctctctgacaccaaaatcatgtggtgggagacacaacgcgtgtaagatttyggcccctgccttctgagaaggtggggtctaagctagagaggctgtactgtccccgtgggcaggtgcctaccagcccagggcaggcaagggtcttgaagga

SEQ ID NO: 37363 - DNA, 201 bp, Bos taurus
agcgctggctgaacccctgaccagtgtgcacacactggcagtgccctccgtgaggagcagggtcttaggaggacaggtgagcctgcagaaatgtcctcccraggcctgaactgggagtggggcccctttctcagcactcctgcaggaaaagaggggaaggccgtgaggagtcgagccacagcagagacgtctggtggagcc

SEQ ID NO: 37364 - DNA, 201 bp, Bos taurus
acaacccggagaatgggtacaatgggccccactagggaggagctgagggaaggtgtccagacacatggaaactctgcctggagcaggagcaagctggcatyagagcggaattcagggcagttcattcctggaggctcagctgcagaaaaaaacgcctccgtccctttgctccctggctctttccttcattcacccactcgc

SEQ ID NO: 37365 - DNA, 201 bp, Bos taurus
acacgtccaatcgccatctcgtgaggcacaggccaggtgcaccaatggtgccggtgcgtaggggtgtgtgtccacgcacgtgcagggcacacacggcacayaagacttcagagcgacgtcgtttcccagaacgaatgcggagtgcctcctgggtgccaggcacagtgaaggctggggatgccgcagtgacaaggccaataa

SEQ ID NO: 37366 - DNA, 201 bp, Bos taurus
taaaatttccttcaacttttagcagacaagcacataacccaaaatggaagaagccaagttgattttcttggtatatgatgaaagaaatgctagttgctaawagggaaaaaaaatctgaagaaacaaactccatattgtaggagcttaaaatctggggaagaggacgagagctacaaacaggaaaacagttacagaaaatac

SEQ ID NO: 37367 - DNA, 201 bp, Bos taurus
cttgagctgtgagggaagccttgaagagcgccttgtagacgtgagtgcgacgactcgcgcagtcttgggaacgaaactcccggggcctgcgagccacgagrcttccgaggtgtgaggtattatctgcgacccgtgctgtcactgcagctccggagcgcagagccctcaggcaggaggcgcagctggccggccccaggcccc

SEQ ID NO: 37368 - DNA, 201 bp, Bos taurus
ttttcatctattcattttgcagatctggggttatttacaagattcctaactcatatgcgtctatttctttgatctagtatttttccctcctcatctccacrtaagttttgatattaaatgtatagttagatacattaataaatgtacattaattgatgtatctaactaatgggcttctctggtggctcagatggtaaagaa

SEQ ID NO: 37369 - DNA, 201 bp, Bos taurus
gacaggccttaggaacattcagaacatattcaggaagtaatgcagaggaccctcagagttcataaaatgaaatatgtataaaataaaccaataatttcacraaaagtcgcacaatctaaaggcctgaatgatctcttctgagaaacgtagtgctattttcaaaacacacagcaaactaaaaccaaattaaccttcataata

SEQ ID NO: 37370 - DNA, 201 bp, Bos taurus
cccagccctccctgccccacggtcggcccccagcccaggcctggagctacctggtttcttccctggctcgggcatcttgagagaggtcacagcaggaaccragcaggcacgggccacccaaagagactctgagcagggctccggtcccggactatataaggggccgccccctctccagaccttccttatctgcaccctgcc

SEQ ID NO: 37371 - DNA, 201 bp, Bos taurus
tgagtggcaaagtaaacctcgactggctgggactgaagggctgggccctgcccagctgtggtgcagtccccaaatgcctgactgctctcactcttgggctrggctgggctggtggagggccgcctaagcatgcaaggggtgcgcccagctgcagcggggactcctctaggctccagctgtccttccttgggccaaccctgc

SEQ ID NO: 37372 - DNA, 201 bp, Bos taurus
tctccaagccccactgacccctcttcccctccacatacacacacacctcgatgacgttggagaccagatacggcagcgtcttgttcactttgattttctcrctgttctctttgatcttgtccttcatggcctggagttcgtgggtgactcgcaacacttcgctcttcatgatctgggatgagggtgaatggaaggaaacat

SEQ ID NO: 37373 - DNA, 201 bp, Bos taurus
ctgttctgtgtcgtcaggtgtcttgcttcaatgagttagagatctgtatccatcctgatggggtcatcccagtgctgactttcctcagggatcacagcaaygcacaattcaaatccttggctgacttgacggcggtggacatccccacccggcagaaccgttttgaggtcagtcaggagatttgaggtttggagcatgaag

SEQ ID NO: 37374 - DNA, 201 bp, Bos taurus
atcaactttacgtttcttcttatgaaatcagcatcatcacaatacttttcacctttactcctccttctctctcaactactgttataaatatatttacataktgctaggtttgggaattccctgacggtccagtagttagcaatctaactcctgggggcacaggttcagtccttggtcgggggactaagattctacaagctg

SEQ ID NO: 37375 - DNA, 201 bp, Bos taurus
aacagctcatttccatcattactgacatatccatagttactgactctccaatcagccggaggcattttataagacacatgacatcccgagcaacatccacrtctgtaagaggaaggtgacattcacgtctcaggtcaatgaagagctgctagttaatattatactaaaagatattaagaatacatgacaggtagctatcta

SEQ ID NO: 37376 - DNA, 201 bp, Bos taurus
ccctgggtgatggtggggaattccagggtggctttggacgggaagtgatctttgaatccagtcttgaagtcctctagtaggtacaagggaataattctcartggctgtgataaaaaggacagtgaattttttaccgggccacattgcccgatgatggtgggaacaatacaacttgactgtgtaatactttggttttggact

SEQ ID NO: 37377 - DNA, 201 bp, Bos taurus
acacatttgtgatcataagtattgatacatgtcttcaaatgtacaactttgagccagacctgggatgtaatgagccttctgtgtagctctttggcctcccwaattactttcaacctgattgtctttatcacattcagttcagttcagtcactcagtcatgtccgactctttgcggcccccatggactgcagcacaccaggc

SEQ ID NO: 37378 - DNA, 201 bp, Bos taurus
agtggtttcttctaggagtgatttggtaaaattctcaaaagatctgagggtttagtgatggtctctgcagtcataaactctattggtgatttccttatagyggtgacttgtgatagtccataatcatctgttgccagtgttcaaggaaggatgctttgtggtgtgagtggatgtcacatgactcctggtctcaggtgccct

SEQ ID NO: 37379 - DNA, 201 bp, Bos taurus
taaacaggaagaaaagcaaattatagttccctctgagatcaagccagacttttccttgaagttgaatcaacttaaagtagaaatgaattccctagcctctrgtactactttttggacttcattttagtgaatttaattattttcctttatatattcacccacacattcaatatttatcatgcatatgatattgtgttatct

SEQ ID NO: 37380 - DNA, 201 bp, Bos taurus
catagtaaaagtgcagtaaccaatgtttgagtatattgaatttaagcaagtaaacaaagatttccctgcttaagtagtttgtttgctgaagttcttacctytcagttgcagtctgcttgccattttatggaaggtcaagattattttgctgtctgtaatttttgtccatttcttatttttccaaaattatgaatattagag

SEQ ID NO: 37381 - DNA, 201 bp, Bos taurus
ccggccaaactgggttgtaaaatggaggaatattgggagttgatcaccccttttcctgaatcaacttgagctggagaaaggggatggatgaaggtcaaagrcaaagcaaggccacaaaccaagggccccagggcattgtgcggctcctcagtgccgggcagggggatggctgggtgcagggatgtatcctttgtccctgtt

SEQ ID NO: 37382 - DNA, 201 bp, Bos taurus
tctcaccgtatttttcattgacattcatcctaaggttttttcacttggtaatttctccttctgcctatataatacattttcccattatagtctcagtttakaagttaattaataagtacagagacacggttgtccttcaaaagaatgttcctgtgacctcacaccagacaccattatatccacactctagagtcaagaaag

SEQ ID NO: 37383 - DNA, 201 bp, Bos taurus
actgggccacctaagaagcccatctttaattctgtatttttcaataattaaataagacaatgtttaaacatttctataccatcattcatttgagaagaccrctgtggacttgcatacttaatgggcctgccctagagataggtttaattaaaagacttgcatactacaaaaggaaaattagccaagaataaaaaaaaacag

SEQ ID NO: 37384 - DNA, 201 bp, Bos taurus
tttacaaagaaaattattctttacccatatatacttgataaacacttccataaaagtttatggacctctacaggtccatgagtccatcatggcagagaacrgttactaagggtgaggtaagggataaaatgaaaatatggagataaaggggagcaaggtcggatagaactctgtggatatgtcaagaattcaaatatagtc

SEQ ID NO: 37385 - DNA, 201 bp, Bos taurus
ttcaaaagaaaaataagccaaaggaagcgtgaatgtataacctctttttgatcctagctgtgtgtttcagctctttgaatcagagaggcatactaaagaaraataaataaatgcagcaccttgaaagaaaacaaagcagtgtgcacagatttcaatacaactccattgtgacttaagtagctgttttcctgcatctcataa

SEQ ID NO: 37386 - DNA, 201 bp, Bos taurus
gaggatgtggggatttgccgacggggtattgaatctaaaattctgaaggtatcgtatcgctggtggtagataaggccacaggttattctcaaaggttacaktatagatagtctacacacacacacacacacacacacacgtttaaatgtggaaaggagcctgcattagcccacctggccctcttgagcatttaaaaatagg

SEQ ID NO: 37387 - DNA, 201 bp, Bos taurus
tccatggtaggttggttacatttcttgaccttggagaagtggccctctgtagaaggcaccctatgcttccacacctgccacccaaggggtgatctgcctgyatctctgggctcagtctgtaagctgcagggctgcaatcttcttgcttctgcaagaaaacttttcttttgcctggtgagtgaggcagtctggagatttatg

SEQ ID NO: 37388 - DNA, 201 bp, Bos taurus
attaaacttgttgaaaaaagaaagacatggaggcccaagaagagactatgaccgtgccccaaatttgaagcaaatttgaaggagaattgggcatggcctartatctctccttgggactccttcaccctgggttgcccaagatggggagagcatccaattctcattcttggggtcatcctctttccacttcaaagggccagc

SEQ ID NO: 37389 - DNA, 201 bp, Bos taurus
ggcccttggaaatgaaggcatggaatccaggggagtcccaggttctggagtcctgatcccaaccttagagtcaccgtgcggcccccatccccgccccgctygaatggtgtgactccaggaaagtgactgtgtgcccctgcgcctgttaggaatggagttaatatcagaacccacgtcctgagtctgagaatggccactggg

SEQ ID NO: 37390 - DNA, 201 bp, Bos taurus
ccttcaccccaccggcagcttcctcaaacaaaacagtaagaggatgcccaacacagtaaacagatttaagggtggcctttgtaggcttggaggggctcccrgagcaccccagatcagtgtccaacccccttcctaagatgatcctgaagcatatctcctgggccctcgggcaccaaggatgccatctgaaaactcccagac

SEQ ID NO: 37391 - DNA, 201 bp, Bos taurus
gataactgatattgaacgaatttgccttgtctggtcagggagacaagcatctgaggagttgtagcattctgttagaaacctgggcctcccccttccaccaycttttttttttttttttttaatgtggaccatttttataagcctttctggaattcgttacagttttgcttctgttttctctttggggttttttggccgcaa

SEQ ID NO: 37392 - DNA, 201 bp, Bos taurus
cccctcgacatctgcgcttgcccacgagcagcgtctgttctgtctgacgttgttgctgttggtctactccatctatgtgcccacccctggcctggtcatamgtgtcctgaaagcaggaacgtccgctctccgtcagctttagtgcctcccctaacagatactctttgtttgtgaccgcggaaaggcagtaaggaggcttgc

SEQ ID NO: 37393 - DNA, 201 bp, Bos taurus
cgcagatccccgcccaaagcaagatgtcctgtgcgtgtgcacgcttgcgtcgtctcagacgcgccgttgcagtggcagcccgcggttctgggttaggcggmctggtaaacggggtagcaggtgcagtaagcaggcttgcgggattactcctaaaatgctggcaagtccaggtacattcttgaggtttaaaactggtgacag

SEQ ID NO: 37394 - DNA, 201 bp, Bos taurus
ctccttctcgggtgtgactcacaggccccgagcctcaggcagagacctctccctacaagagataagccctctcggggagagagctagaaggggattgatcygggggaggtggtcagtggccactctctttcccttaccttgctggtcttttttttttttctcccttcttgtttccagttccctctgcagctgccctgaact

SEQ ID NO: 37395 - DNA, 201 bp, Bos taurus
cgattgcttctccgggccaggcatgcgtcctgcttctcttttccccaaggtttctccagggttaaagatgaaaggggaaccttgatgaagctcctgacccygggaggtggccacaatgggccttgtctttcccttggtgaataggctcccgtgtacccttgctgggtaaagtgtgtggtgtggggagccctgtgttcacag

SEQ ID NO: 37396 - DNA, 201 bp, Bos taurus
ttccctctgcaggaggccgcgccaagaccttctccacgtgcacctcccacctcactgtgctgtcgctcttcttcgggaccctcatcttcatgtatctgggrgatcactctggccggatcacagcggtgatccccatgttgaaccctcttacctacagcctgaggaacaaggaagtgctggaggctctaaggaaaattctca

SEQ ID NO: 37397 - DNA, 201 bp, Bos taurus
gatcctatggtatcaaggattataatctttatcttaagatagaagcaatgttatatttctggaaagggacatccggaatttcttctacccagttacagtcrtgaagagtgaatacaatcagttttgtctgggaaggaactgctcaaagaaataaaagacaagaaagaattaaccttcaaacagcattcttggccacagaag

SEQ ID NO: 37398 - DNA, 201 bp, Bos taurus
acagtatagtgagaacattttaggctatatacaacactgttcttgacacaatggaaagccaaaaaaagtaagctgaagtaaaattaatccaatttcatatktattttactaagtttagtttagtttaaagaataatttttgtttttgttttggaaactttgaattgggagccagagctgttctagttagcaaccaatctga

SEQ ID NO: 37399 - DNA, 201 bp, Bos taurus
ttaatatatcatgttcaagacttcaatagtctcacaggtaataggatacatagaacaagtaattcccacagagtgggatactgagaaagtcctctataaaraataaagacatcagagagtaaaagtttaaagtgtaagtccagactaagaatatctgagtgcaaattctatctccgccttgtatgagatgaccgggtattg

SEQ ID NO: 37400 - DNA, 201 bp, Bos taurus
caaaccgtttggcacccggttctggtgttgtggaagacaatttttccatggtccagggagcacggggggatagtttcgagatgattcaagattgtgacatktgtgtgcattttgtttctattgttgttgcatcagcttcacctcagatcatcaggtattagatcctagaggctgcagatccttgccctaaggagtctccat

SEQ ID NO: 37401 - DNA, 201 bp, Bos taurus
tagcagttataaagcactttcacttgcatcgtgttaacttttcctcacagaagtccttgctatagtgttattgcttaccctagacaggaaatgctgcaatyaaaacaaatgagaaagttacatgacagctgagggttacatgacaattgtcatgacaaatgacaactgagcaatgactctcagggtctggaaacccgaagt

SEQ ID NO: 37402 - DNA, 201 bp, Bos taurus
ttctgcaaattaccttcagatcatagtaactttaaatctggtgtggcagttaacgttgattgtcaacttgactgggccacaaggtgactggatatttagtyaagtgttattctaggtttttctgggagagtgattttgcataagattaagattaaagcagatagcccttcttaatatgggtgggcctcgtccaatcagttg

SEQ ID NO: 37403 - DNA, 201 bp, Bos taurus
agctcctcctaaaataggatttgctttcatatttgtttaacatttcattatgcttatttttacaggatactttgtttcaaagcaaaacccagaggtgcttrgaggtaaatacaatcttgattctcaaattggagtttaaaagttatctcagtaggtatttctttcactggcaataagtaaaaacattaaacttacatagat

SEQ ID NO: 37404 - DNA, 201 bp, Bos taurus
gtagccatatcctccagagcaaatgagaggcaacatatgttttttatttatccacataatttctcaaggctctgaaagctggtttcaacacaaaccaagcrtgaggcatctcagctgggcatccctgggcatagggaccacctatgtctatggtggtttcagataactcagctaaggctgaggatggcttttttctcaaag

SEQ ID NO: 37405 - DNA, 201 bp, Bos taurus
caggcagcggaatccccagttctcatatcagccacaccaccaaaaacagaagtcgtgatctccagctagctgaggccatgtaactgagctcagagtaaatmaagagactgaaggggatggttcgcgcaatttgcaggaagcacccagaaaaggcaggcgtgccgtctcctctccccctgagggccagggctgcagcagcca

SEQ ID NO: 37406 - DNA, 201 bp, Bos taurus
tggtgcgctccttttttgggccgtcaccttgcatttcttcagcagctgacagtttctccagtttttcaaagtaattctaccacacgagaagacggtttcakttgcagcaagcgcagcacacggccgctctttaccatgaagcggcttataccagtggcagcgatgctgctcgtgctctatatgtactggcttttaactttt

SEQ ID NO: 37407 - DNA, 201 bp, Bos taurus
tactcagacacgggcatttcaatattcgcttacacaataagaggccagccacaagcatccgtttctgcaaaaattccctggtcgttaaaaatctgtggccrgactatctgacagtgatctttttattttcacaaaatcacacttctttttatgcaattgagtttcatatgtttcggtatcgcctctttaaaaagtctgtaa

SEQ ID NO: 37408 - DNA, 201 bp, Bos taurus
ggcagtgttccttgggaggtgggcagatgggtgggccttggtttccacgatcaggtctgagtctaccctcaagcctttaaatagcagttaaccttgggccrgttcctgaacccagctgggctttaatccctgctctggaaatcaggaacagcagaacttacctttcaagcctggcccgaggatcccttgagatcacgtgag

SEQ ID NO: 37409 - DNA, 201 bp, Bos taurus
gaaactctggaagagggccacagggtgaacccagagtaacgttcttcccttccgaggtgaggaaggtttttgcagccctgagttgtccttcacgcctgtaracgggagtggtgcccctggccgcggccaccctaccgtgtgatctatgatctcccctccgtttctgtcgtcctttcagccctcacagatggaccctcacct

SEQ ID NO: 37410 - DNA, 201 bp, Bos taurus
ctcaagtattctggcctggagaatcccgtgcacagaggagcctggcaggctacagtccacggggtcgcagtgtcagacatgactgaacagctaacactttyactttcaagggccaccaaattcaactcaactccttttattttatgccagaggcaattcagcattaaagagataaaaatcctgttctcccagcaatcccac

SEQ ID NO: 37411 - DNA, 201 bp, Bos taurus
caacccactgcagtcacaagaatgcagctcagcaaacaccacctgggcttcctgaaaagcacagctggctgctagcctgagacccacccaatgcaccctcrgggcccctctcccttacactgcagtccactgtctcaccggtacactaattcctgtgcgtctatcacgccagatgctgacgctgagaagctctgttccaca

SEQ ID NO: 37412 - DNA, 201 bp, Bos taurus
ccctgtggacacgatgcggaaggcagcgcagctgggcttcgggggggtgtatgttcaaacagatgtcggaggggcgggcctctcgcggctggacacctccrtcatctttgaagccttggccacaggctgcaccagcaccacggcctacatgagcatccacaagtgagtgccagcccggtggacgcagcgtgtgctggcgtt

SEQ ID NO: 37413 - DNA, 201 bp, Bos taurus
ccacgtgacgaagcatccactgagaggaaaggccactgctctggggaattggggggggcggggccgggcagcctcctcccacatgtgcatccagacccccrggtgtgcccaggggtgagtcctctgcggggctccaattcactgccctgagttgcaataaagccacagagttgattccaggcctgcttggcagtgtctctc

SEQ ID NO: 37414 - DNA, 201 bp, Bos taurus
cctgagactattcccccagaagacatagtgacctgatcacggggtgggtggtgaatggaggaggaatgactctgtgtctataacaaagagtggaatgtggyagctgtcctttggggcgaggccaccctgctctccactcttctttcttattatttacttcagaacccctgctgttctactccactgagatctattcctgaa

SEQ ID NO: 37415 - DNA, 201 bp, Bos taurus
tgaaaagagcttcacttcttagcagactgagcttaaaatagtttcttttgaaattgtttcattaaataacaggtccttttacccaatctaatactttcacyttagaatattgtttactcagatttcaaacaccttaaattatttcttcagcaactaacttattttggctaataaatagtagttttgcataatgcctatgga

SEQ ID NO: 37416 - DNA, 201 bp, Bos taurus
tagtgagcaacactgaaactaggttaacacaaactgactccacattgttcaaaagtggatgacagtaatacaaattgataaaattatttttagagacatgraaactgccataataatactaataaataagatctttatgtctggcacaagtggcaagagctatatgtgcatatgctttgtttcttggttggaaaagttgaa

SEQ ID NO: 37417 - DNA, 201 bp, Bos taurus
tatcctttaactttctcaatattaatgatacatctttgggttttattcccattaagcaagttagaaaaacttgtaagacaaaatttccagtgtctatactrttcccttcttccctgaataatcttttctaatttttcatttactgaaattttaataatcctttaatatcttcaaatgtaacccactttcttaagatttaat

SEQ ID NO: 37418 - DNA, 201 bp, Bos taurus
tacctgaataaacaactgactgcaaagtgcttttgtagtatatttaaaatcaaaagctgaaaaattctaccaactctctaaaggttcaatgtgttgctttyatattttaaagattcacactagggataccaagatctacaatttctttgattagataaaaaaccttggattttaagtgtcatgtaattggcatgtaatttc

SEQ ID NO: 37419 - DNA, 201 bp, Bos taurus
tgaagtgatgggaccagatgccatgatcataattgtgtccaaactaaatagtggaaaatttgataaacaagctttatcggtaacaagctttttgatcaaaytcttaaaacttaagctatctcatttgtcgttcagtttctttatttaattaaaggtactaggtctaaaattattattctaaattaactaccatatataata

SEQ ID NO: 37420 - DNA, 201 bp, Bos taurus
gattttcctttcctcctcttttttaaaaattttttgatgactcatcaggatatagaaatacattggaaggaaccaggtccatgtattgccctctaatcatrtatgtcccctttttgtaaatatgcctccttctttctttatggaggttatttaagatctccagtttgaacagatctagaaaataaataattttaaacaatg

SEQ ID NO: 37421 - DNA, 201 bp, Bos taurus
caattttgccttcaaaataaagattctggagctcctactctggttaagatgttgtactgtgctctgacggtgattcagtcataaataagaaatgactctgrctctcaaatatgggtccattgggagaggtaaaacatgaacacaaataactcaaagacagttgaaactgattagagtctttagggagtcataaattaagtg

SEQ ID NO: 37422 - DNA, 201 bp, Bos taurus
ctcagtgtgtatatgctatacaagtcagacagttcccactagcaccagcacacagtgaagattcatctataaaccaagcttatcttttctttcttttcttytcaaccacctggtcatagtgaatttccctaggtatgtgggttggagggaatgttaacaaaacagcaggggtagataccgtggaagctgggccagcagttg

SEQ ID NO: 37423 - DNA, 201 bp, Bos taurus
gaagacaggtttattttctcctggctaatgcagcagctgtagcagcagccatggcgtaacctaacacaacacaacctctctccttcttggcacagcagccrtagccgaggacacactatattctctcttctcatggctgacccaatcaacacagccgtgatgcgacagtaatggagccgttttctagacagggctcacata

SEQ ID NO: 37424 - DNA, 201 bp, Bos taurus
ttattagctgaagacacaactacatctctgataaactaagaaggcaaaaagaagataaattccaagtttctaaattgacaaaagaagaaacttgtcaggtrtaagatatagaatatacatagcttatgaaacagatttgtcaaaaatacagaactaaaagatacaattgccttaaagaaaggagaaaattatttgtgctta

SEQ ID NO: 37425 - DNA, 201 bp, Bos taurus
ctgatttgtgcaaagagtgaaggttatagggttaattctttttttttttcagtattattcattcggtaaatatagtttactggttttatgtacaaggaagktaggttgtctgagtatgcacagaaatgacagctatgccaaaggaagaaggaagagcgaccatttggggttagtggtgaagaacttaaaattaaattttat

SEQ ID NO: 37426 - DNA, 201 bp, Bos taurus
cccatggactgcagcctaccaggctccttcatccatgagatttttccaggcaagagtactggagtgggttgccattgtcttctccatgagcagaacatagrcagcattaaatataggagaaaaatccataagtttaagaactatgaccaggaaagtcttttggatgtggtaactttcacacacaattgcttgaaaacaaga

SEQ ID NO: 37427 - DNA, 201 bp, Bos taurus
acctttgaaaaatattctgttaactgattattggggatatcagttaatgcatttctgatgtcaaaacatcagtatttctgctttgtaaatttaccttttcytcattaatcctgaaagctatccatcttcaagggtgtctccaagaagtgttttcaaaggacttggagcttgtgataagatttccttgagaaaaggtcataa

SEQ ID NO: 37428 - DNA, 201 bp, Bos taurus
aataagggaaactgtatgaagagggagggattaaatgagaactctgtatgttctgttcaatttttatcctaaactaaagcttttctaagaaataaagtctraattttaaaaatctttaagagaaaaaacagaatgaacctctgaattaatgccctcacaacaagaaaaacttccacatactgaaaagagaatactgagtag

SEQ ID NO: 37429 - DNA, 201 bp, Bos taurus
ctttgccttgtgaagactaaaacattaagcaccctgggcagttttcttaggaatatcactgagatattgggctggagatgtgtacatgcatcaggagagcrcatagacgaagttcatgtgtaaaggacagagggattaaggttccaaaataacaggaaaaaagttaaattgatctgagaaatcttttgagagaggagaatg

SEQ ID NO: 37430 - DNA, 201 bp, Bos taurus
ttatctgacacctgtgctctctccctgacacatcacagtcttacctaggagcaccagacaagccctcagtttgggggccatttcaaagagcaaacccatcmaaaaaagggcacacaaatgcaagaactgtagcactaaatgtacctttaatggccacttatttacagcgtgagacctgaagcaagaagacagagcatgact

SEQ ID NO: 37431 - DNA, 201 bp, Bos taurus
tgggttgctgtgccctcctcacgggatacttctaacccagggattgagcatgggtgtatagcatgcgtgggtttaatatttttggtgtgaaggctgttttyggtgtgaatgccccctgcctttttccttggtgtgtgctggccatgctacccttgttgcaggtgtgcagatgtggtggctgggtgctcacttccagagttc

SEQ ID NO: 37432 - DNA, 201 bp, Bos taurus
agaagcaatgggccaggccagtggtttaggagtggctagctaggtttgaaagtgggaccctgtaaagttcatgttcatcattactgttaaagcctatgttkgggggccatctaaaggctccagatattttgacgtgagccaagatctacatggctatggttgaggcaggagacagatggacccccagggcaaacagtagga

SEQ ID NO: 37433 - DNA, 201 bp, Bos taurus
tttatctaattcttgcattctcagaaaccagcaggaacaaggaagagtatatactagggatttctctttttatttggctgagaggtaggattcttagttcrgaattactgtatgaagtgagaaatgttgatgacgggagaacagtggtggtgttcagtcactaagccatgtactactctttgcaaccccatggactgcaac

SEQ ID NO: 37434 - DNA, 201 bp, Bos taurus
caacaaaattgaagcccagagaagtttactgactcccccaaggccagcaagcctagttctctagcacaggatgaatactaacatggccctcctttctcttycttggggtgctctttacctatatgctcattttttggtttcttcaaactctagattgaattctttcaagtcccaagcctgtgaattaaataatttttgtga

SEQ ID NO: 37435 - DNA, 201 bp, Bos taurus
aacataaaaaacagctcccttatattgcaaaatacttaccctgagacattatttcttttcaaatcataggtgaagcacagtgttggaactgtgactgttayatcaaattaacaagacaggtattagtggagactttaagaaagatcatgtcaaaccagatactaagtttgcattcactaaatggtcttcaatgctttattc

SEQ ID NO: 37436 - DNA, 201 bp, Bos taurus
cctggactcctgagcgcggtcgatggaggatcaccctggtctctccccatcaaacagcctcctcctctgactttacttttcaggccaataaaacaggacarcctcaagggaagcatcatgaacgtaaggaatgagaggaagcacagaggtggagaaccactgtctgtgcaggtaaaactccacaagcaacttcaggaaacg

SEQ ID NO: 37437 - DNA, 201 bp, Bos taurus
ttggcctctctaaatctcagatccacactatttggaactcaaaaattctcaccctttgaaacagttgcaggacacccagcacatttggttcctgctttttkggcctccaactgaaaaaggagagatattccaataatgtgaaggccaaatttctcctattaaaagtaaccatgttttggtagagcaatctttttatactgt

SEQ ID NO: 37438 - DNA, 201 bp, Bos taurus
aatggtcagatcaaaggatgcctatttatattgatgacattaatggtcagaaaagtcataccttctgaaatgtcattgtcctagtgtacaattctgccccmaaatcagattcaccccatgagaggtggggagagagacctagaaacagtattgtactgaaacagtctccattgtccatcctagacatcatattaaaaagga

SEQ ID NO: 37439 - DNA, 201 bp, Bos taurus
tcttgccctcagtctttcccagcatcagggtctttttcaataaattcgacaaatcctcattcaatctgtttccttgctacctctgacttgtctttattagyatgtccctgtgctctctgatctagctacactgccctcaagggcttcctggttggtggtagtggtaaagaatctgccttccagtggtgcaggagacacagg

SEQ ID NO: 37440 - DNA, 201 bp, Bos taurus
tttaaatatagatgcaactatcatcaaaatacacatggacctaaactttatgatccttcaaagcatcttttgcaattggtcaggcagtcatcagctggtcrtagaagccccaagatcccatctcgtcgccctaacgtctgccagctggctcagttaacaaaccattattaatcttgaaaaaaataatgaatatagatttga

SEQ ID NO: 37441 - DNA, 201 bp, Bos taurus
aaccctagccctgtggccttagggctgtgttggctcattaccaggtggacaggtggatggaggtgggaggggggtgtgcctgtatgtaaggggaggatggrtatgtgtgtacaatgaggccgctattgtaaagagaagcacagcaccaaattaggccaaaaacgtaatcaagaagcagagctcaaaccaaacttaataaag

SEQ ID NO: 37442 - DNA, 201 bp, Bos taurus
cagctagctgtgcaggcactgtctccattttcttgagagcaggaataaactcagtcaccagtgatcttgcaatgcaacatgaagctgggtttccggggccygcacccactcagctgcgactcttctccgtgtcctccactccacgtggcatttggttaccctaccactgttcctcgcaggccttgagtcagaaaccatgct

SEQ ID NO: 37443 - DNA, 201 bp, Bos taurus
ttgtatgttgaatcctaatgcccaacgtgatcggcatgtggcctttggggtgattagattatgagagtgacacacatcccctgtggtgggattaatacctycacaaaagaggcctgagcgctcccttgtcccttcttccatgtgaagttgctgcaaacgacaccatttgggatgaggacctcactggacaccagatctact

SEQ ID NO: 37444 - DNA, 201 bp, Bos taurus
gatatagcttgtttgtagcttgtttcatttgtgcttcctgattagtccttgtaacagtttcatttatctgctgcagcgccgttcacctggcttaaatgaarcaactcttgtctcctctattctactctggtatccatcaattccatctccatacaccccagggaaattccattctcttggcaataggcagagcacttctta

SEQ ID NO: 37445 - DNA, 201 bp, Bos taurus
accaagctttgcatctggtcttcatgaggcaggagagactgctgcaatgtggggtcagaatgtggctttgtgaagacctcagggatgtggccaaggtttcyggactcattccccatccctcaggagtgactcactgacacaccattgaaagttactaaaacatagttatagctcaataagtacagttattatcttggtatt

SEQ ID NO: 37446 - DNA, 201 bp, Bos taurus
cccttccccaaaccaagaagatgtgagggccattgtctgaaatcctcatccagagaaaccctgtattctggaagaccagtccacaggcaaggatgtgtgtygttactaaagatgggccattccttgaaaatatgctgaacactgaaactctggctcccttttgcttaatgaccaaaatgaaagtggttgcctcaaagaggc

SEQ ID NO: 37447 - DNA, 201 bp, Bos taurus
acactatggggaaggctgagcaaactgaatccttgaacatctttggatctttagaagatcaaataaaaaacagctgcaattttatttgttgcatttccaamaaaacacagtgacttgtatcatgatgtgaaaacaaatatgctctgtattaatgtaaataagaatattttttctaatttgatggaagaaggttgacatgaa

SEQ ID NO: 37448 - DNA, 201 bp, Bos taurus
aataaagtttcagaaatctgggaatttggttcattctataaaacacactctatgtttgcagctccaaacattgagctaaggtatcctgactggttggtacygtcagactccaacaagaaaagggtgctttcaatcgaaacacacaaaagatggtattgtcataatttaggtcactgtactttcatcttcagtaaatcccaa

SEQ ID NO: 37449 - DNA, 201 bp, Bos taurus
ttgaaagccagagggaatgtgggcccaggagagcccaagcttgtatgcgactgaaacactgagacgaccaggaagcaccattcaaggacaaaccagagatygcgcttggccagagaaaccagacagcaagcaagagccccaggtgagagacagccagagagctacggaactgtgagcacacgagagagcaacagagatgga

SEQ ID NO: 37450 - DNA, 201 bp, Bos taurus
agatacatccctttggaagttgtagttgcaaaagtcatttcaagaacagggtatagttttgtgatagcttgaaggcaagagagcacatggcctattctggraactataggaatagaatggctctgtcataggattgaagtggtaaaagaagacatgggagatgaagtctgaggccgggtggatgaactatgacatcctaag

SEQ ID NO: 37451 - DNA, 201 bp, Bos taurus
gagaggagatatcatctcagtagtttaagggttgcttgtctggatatttcttaaactattcatttggctttgtggttatatggagacacatacaaagctgygaggtacatggggttgcagagtgtggattaaaatccacgtgtcttaacacagattacaacggaaatgcctatactactttccatttctttcactcacatt

SEQ ID NO: 37452 - DNA, 201 bp, Bos taurus
gattctttccctctcctatgaattccatcaattattctgttgccttcccatacttcccatctctcagaatccctttttcctttttggaccgtggccattcrcttttggaatgctgaaaaggagccaagagaaagctgttctccaacttcacagtagcttaacaaagacatagatatggccatcattgcaggttgacaaatc

SEQ ID NO: 37453 - DNA, 201 bp, Bos taurus
aaaacatttccatgctatagcttatgactcttgggctaactcactgaatggccacactggcagctttgagcctgtttttgagtataaaaggcaaaaagacrataacttgccctctgtgtggtatctcattttgacttcgcagtcaatttgggggcctattaaataatattgtcaaaaaagcagtgtgaaaaggactgacac

SEQ ID NO: 37454 - DNA, 201 bp, Bos taurus
cccagtgggatgaccacagccatctccagataccaccaaaaggccccttaagagacaaacttctgaggctgagaagcactgggccctaggtcgtggcagcrtcttgcaggtcacacaaggaagtgtaggagatcactgtgacctgacttgcattttgaagaaattactatctgctggatccatgcagagagaccaactggg

SEQ ID NO: 37455 - DNA, 201 bp, Bos taurus
ccagagcaaagataggtttatttgaggagcatgatggcggctccctaactgggagactcgccatctgtaggagcctttcctctccctgaagggtatgcggscatgcgtgtatgctaaattgcctcagtagtgtccgattctgtgcgatcttatggactgtagcccaccaggctcctctgtccatgggattctccaggcaag

SEQ ID NO: 37456 - DNA, 201 bp, Bos taurus
aagagagacaccacagcctataaagtgggctgagagggaggaggaggagggccaggtggaccgtacaggtgacctgccgtcttggctctgcctggcctcaygctggctgcttttctccttcctgccctggacaggagaggctggggacagagcccagggggagcccgctctgatagggcagctgcgtctcttactggagtg

SEQ ID NO: 37457 - DNA, 201 bp, Bos taurus
tataatattgtaattaaactgtacttcaattttaaaaaagaaactatctaaaatgaagtacatggagaaaaaagactcaaataaaataatcagaaccatastaatatataacaatatctatagatccaatgtatgtgtaattgacatctcaaagaaagaggggaaagattcaagaaaattacttgaaggaatagaggctat

SEQ ID NO: 37458 - DNA, 201 bp, Bos taurus
gaggaatcttaaacttttatgcattttaaaacttttatcttagttaaagcctggggtttgagaaaatgaggtatgtaaccacaaaaaagttcactccttaytggctggaaacctactaaaaaatccatttttttttccagagatttcctaatctgttgcaaccatatatgtttttgtttcttcatgagtcatttcatttaa

SEQ ID NO: 37459 - DNA, 201 bp, Bos taurus
tgatttaacatttctcaatgatctaattttaaaggaatgaaagtcctatatgcatatgactttaaatacaatggtattaaaaaaacaaactgatttttttwaagtaccatatttgcccatcaggaaaaactgtagaataaactggaatattatgtgaaaaaattttcatataagaattttatctcaagaatttgaaccttt

SEQ ID NO: 37460 - DNA, 201 bp, Bos taurus
tcccttctcaacctcgttctgtcctgcattgttgcggggcctttcaggcatacatgtgcccccacctccagcccagggtcttaccttgtttccatctcccrcagatgactgctttttggccatcccttgtgagagatgggccagaggcagagtcctgtgatggtcccagaagcagctcaggaccatttggataggacatct

SEQ ID NO: 37461 - DNA, 201 bp, Bos taurus
agtgggaaacgccaataatagcccctgtgaaaggaaggaaaaccatagtaggccaaattagcggacactgttgtggccctagagatgggctctgctccagraatctctcccttccattctgcatccacagggtgcaggggtggctggcctgaccccgggcacacagcacaaccagagggtggatggggacaagtgtcctgg

SEQ ID NO: 37462 - DNA, 201 bp, Bos taurus
tgtcagtccttctgagggggcaaggggaggcgctgggcacctccacagacccagaggaatggcctgaccccgtgaggcctcacttggggtagggagctggktgagtatgtcacactgtgaaggaaactgcagtctgcttcaggtcaaagaaggggcaggaagcccatccagctgcagagaaggccttgagagtaaaggtaa

SEQ ID NO: 37463 - DNA, 201 bp, Bos taurus
tcatgtaagatcttggactcccacaaaattgtctctggacgtacccagagtcagtgtccctcccccatcaccatacttgtgggccatgctcttcctctgcytgctcccatcctccaaaaagcccacatgagagtccagcacgtccacatgcccaagtgagaccccagggtccctgtctccctacattaccactgctgccgg

SEQ ID NO: 37464 - DNA, 201 bp, Bos taurus
ctagccccgtgagttgaagggcctgacctgcactagctgatggtccagagatggctcctctgaggacaaagcagggtgggctagagggcagatgccacccrtaaagagaactgtggccagaaggggttttgcctggtaatccagtcctcagtccattttaattctcctgcctttcagagacctggaaccctggatctgctt

SEQ ID NO: 37465 - DNA, 201 bp, Bos taurus
cccctctgtgaatactcagaggcacattgctggtctacagtacccacccattgcctcccagagcctggtgtcctcagggccagaacaagtactgcccagayccactggctgaaaggaacgccttggtgcatgggctctggggaactggctgaaccttggggtcagagaacaagacaacttgaacaaaaacacaggtaaggc

SEQ ID NO: 37466 - DNA, 201 bp, Bos taurus
caagacgacacagcaagaaaagtggccgaggtcagtcccacagtcctctcaccagcagtgtaggaaagacctcaggcttcagacaggaagaggcaacagamaggcctgggaggcctgagacctgtggcccttgctacgcaaggagatgcaaaggacaaaagactcaggtgacctgagatttctcgaacactctcctgcctg

SEQ ID NO: 37467 - DNA, 201 bp, Bos taurus
aggcccctctacctggatttggaagagtgactgtttgacctcttgcagacctcctgagctatatcattctaccattcttcttttctgcaaatcatacagaygccaaccttcactgttgcaggccaaggcaaagctagacattcctgaacttgcacgacatcagtgcctctgggtcccctcaccccctctctgcagcctcgg

SEQ ID NO: 37468 - DNA, 201 bp, Bos taurus
ttttcaagccccatccatgtggcagcattccaggagaggccttggtcactggcaggcatcctctcaaaccagttagaaccacaggtgagctggagcctcaraggtcagtggatcatctggcctggcctgtaccagccagcctggttttacccagaccccaacgtggccgacccaaacaggctgtgccagaaggagactcca

SEQ ID NO: 37469 - DNA, 201 bp, Bos taurus
ggttggctaggctagtaccaattagtacatcttggccagaagcagaattaaagcctacactgctaaccataagtaaagaaaccttggaggaagacctgagygacaaccatggcagcagtaacagcagcagctacaatgctgtgggagggcctgaattttgtcacttttttttggctgtactgggtcttcattgctgtgcac

SEQ ID NO: 37470 - DNA, 201 bp, Bos taurus
aggacatggtcgtgatctttggtccgggaagattccacattccatcatggggcaactactgaagccctcgagttttagagtctgtgttctgcaataaaagmcaactcaatgagaagccctcacacctcaactaaagagtagtccccgtccgtcacaactagagaaatcccgtgagcagcaacaaagacccagcacagccaa

SEQ ID NO: 37471 - DNA, 201 bp, Bos taurus
gagcacggtttccacagctgtggcctctgggctggtctctgcagtggcacatttctcagatgaagggcagccagctgtcagaggccatggggctctccccrcagcacgtctccttttccctctgtcacttctcttatgttccagcatctttctcacaggagggggtattggcctgtcccacctccaaattcgaagctgcca

SEQ ID NO: 37472 - DNA, 201 bp, Bos taurus
aatgttctacccacaaggaaacagcttatggaagctctgggcttggtaaccaatggggatcttagaataagcctttcctttctggccccgccccctcaccygaagcaggagtcttgaggctaaaagaaaatgctcttgcctgatctttctctgcacggccacccccacaaagcctctaatcaggtgcctcagacaaacttt

SEQ ID NO: 37473 - DNA, 201 bp, Bos taurus
gagctgtccttctgggcacctattggtgcaatccaaacttctcgtgtctgtcagtcctgtggacagaatgacagagcaataccctattctgacaagttctytctgttgctgctcgttacagtatctgaggcagaaatttcaaatgtagtttgtattgctgcctgacttgggtgctagaaaacattttcagatatttctctg

SEQ ID NO: 37474 - DNA, 201 bp, Bos taurus
ctttgaatattgctttctgagaaagtttaaatgtattagtatttgattgagaccgttgtacatttttaaattttagttaactaaaaatcttgctagtggargtgctcaatattttaattagcatgattattgaaaggaaaaaaggtaaaggacctcttctgaaacaagtaaaacatatatgtagcaactcgattgtaaagg

SEQ ID NO: 37475 - DNA, 201 bp, Bos taurus
attcctgaggagaaaactgaatagagagaaaaaaaaagaagaaaaaagctgttttattgtctctgaactgatgaaagatttgagtttacagattgaaaatscttcctaattcaggcagagttgtcataaagacatatttggacataagctagaaaattcctgaactccaagcttcaaagacaagttataaaagaacagtga

SEQ ID NO: 37476 - DNA, 201 bp, Bos taurus
cagggaacaggtgtgtgagtacctgtgtatgagcacgaaggagaaggctcaggctgaccgcgcagggacatgccatcccccaaagtttggccctagtctcrcctccatttcttctagtttaagagatagttccttgtgtcacttcccttaagacaaaacaaaagcattacttagatttaattgatattttggcttggccaa

SEQ ID NO: 37477 - DNA, 201 bp, Bos taurus
gccccagcttctttccaagctttctgaggtcccactgcccccaaagttgcagactgtaagaaggagaggttatggaatttctccccaccaggaaaagaaarttggtaaaacatgagagtttggctgctgagactttcactggcctggctggggggcggcagggtcctctggagctgttacatttagttcaaatttctgctg

SEQ ID NO: 37478 - DNA, 201 bp, Bos taurus
atggacggtgggagctgagggaggcctggaatgagttctctcgattctcatggctgatgtttccatccagctggaaataatcacccacgggccacacctgmcaccacggggactgattcccaaattaaactctgtgggaggggtgattgggtcaggtgcttctcccatcatctgcgatcaggtgagtgggacctatgtggg

SEQ ID NO: 37479 - DNA, 201 bp, Bos taurus
gattatcccatgggaggtaaagtagaaaaacatactccccacagaaatgaacatactcaatcattgtctagaattttctgaatgaattggggaacgtcaaytagggggcacaggagactagaccacccaataaggagtgccacgtcatcaatgctgcccaaaccagaaagatggcttcatgaagtggatttatggattcta

SEQ ID NO: 37480 - DNA, 201 bp, Bos taurus
tctggaactctgctgggcacctcccttccctttgatgacttccactagctcttcatgcagagtccaagttggtccccagctccacatgtgcataatgacayctcagctctagtccctcatcactgaggggccagaggttattattattatttaattgattgatatttcaaaatcaacttcagtgaggtataacttaataat

SEQ ID NO: 37481 - DNA, 201 bp, Bos taurus
ggaggagactgtccctggcgagtctgcagccctgcgtgaatggtatagagttccaggggtgtgcatattcctggcaggtagaggattagactttttctctktattaactcccacgggggccattgaacagaagaccgactctggtagaaattgccggtgtcttgaagggccaaagaattgatgcttttgaactgtggtgtt

SEQ ID NO: 37482 - DNA, 201 bp, Bos taurus
gctaggtttctcagacatgacactctccagcaaataacaccagctccaataatatttttatttctcgcatgccatctctggccctgttccagggaaatttyattgcatggggaaggtggaattagaagcagcaagttgttaattgacatgaagcacacctgcatattggccccctcttcccacctcccaccttctacctaa

SEQ ID NO: 37483 - DNA, 201 bp, Bos taurus
ggggcggggatgaagcctgcaggcccaactggcaggggtcccctagaaaccagcggacacaacagaagcagggacggtacagactctgggcagcctggcaytgaattcctggccccaggccgcctccctgacccccagggccaatggggtgagtcaccccactgttgcacatcagacgcccaccctcctccctgctcctat

SEQ ID NO: 37484 - DNA, 201 bp, Bos taurus
ataacgttttacgttactaagtgccggagacagggttaagaaagaatctgtcttaagaaatccccctcttcaccagcgtaagctgctgtcacttggcccarcaaggcagaaatcggagaattaaagtgatgccaaacgtgggacaaggggaaatgcgaaaagtccccgcaaatctgttttcctattgttatggacaaccct

SEQ ID NO: 37485 - DNA, 201 bp, Bos taurus
gtgtcaggattttgacgcccttggccctagccagctgttgggtttcactggtgagggttttgtatgaacatgggactgagggtcctttttggttatgttckccgctgccttttctttggcccgtcctcctgctgcttcaaacgctggggatcttgtcaatggtcatgcctttccccagtgcctgcccctctgccaaacgga

SEQ ID NO: 37486 - DNA, 201 bp, Bos taurus
attaaaaactctttacaatgcatgtttcagaatttcatctctcattgattctcatgtgtgatcaacttttcccagaatcagttaacccaagttgccaagtygcagatttctgtggctgcttatgacagaatatgagaaaagatgcggggagaacaatgttaaaaagcaaaacatacatgaaggaacctactagggagtcag

SEQ ID NO: 37487 - DNA, 201 bp, Bos taurus
cagcaaaatcattacatctgagaagcaggctcagcaaatcgatgagatgcatcgaaaactgcaatgccggcagctagcactggtcaacagaaagggcccarttctccatgctaatgcccgattgcacaatcaatgcttcccaagttgaaggaattaggctacgaagttttgcctcatatgccatattcacctgccctcttg

SEQ ID NO: 37488 - DNA, 201 bp, Bos taurus
ttgactccagatcacactggcctatgaccaggcaggacttattcccagtccactaacagccagactactgtctgctacagcccactccccaggccctgcayccattcttcagttcttccaagcattaggactatagagcaaatatcattgtccttaactatatgcctcacttaatcctcatgagtaactttaagcaattct

SEQ ID NO: 37489 - DNA, 201 bp, Bos taurus
aattctatctcttttgtactaatgggagatcctgtctttagtaaattttaaattcctttatgtaactgaccccatttctggacttcttattcatgtgttayttgttgaggctttataacatgtttcaattatataatgggtctgtcatcactctacttttaaagagttcttctgatgattcttaattatattcctaaactt

SEQ ID NO: 37490 - DNA, 201 bp, Bos taurus
atttctaaaagttactcttatattggttcttttggatttttcatttcccagcattatctattaacttcttacattggaagatgaggatttagtgctctctmaccttcacagttctccccctgtattgtatctcatatccactctctcttcaactctcattctacaatatagttgaaacaaattttatttttatatttagtg

SEQ ID NO: 37491 - DNA, 201 bp, Bos taurus
ccaggggctcttcctaacccgggcatcgaaccaggagttatgtctcctgcattggcaatagggccgttttcagctttcagatcctccttagcttaaatgcygtcttttctatatactttaatttctgtgtatcccacttctttcctgggatctcacagagtatatacctttactgcagcatttattttcttggtttattat

SEQ ID NO: 37492 - DNA, 201 bp, Bos taurus
taaagtatactttacagtagtctgtgtctgttagatttttgagatgggatttctgttttaataatgattttatatgctagtagatattggttccattttcyttgtctatagttaaaagtattagaccagtttgaagatgactgaactgttttgttttttttttaagttgctattttataatttatgcactttgcttctgtg

SEQ ID NO: 37493 - DNA, 201 bp, Bos taurus
ccccagttccagcctcgagtccattccttctacctctggcccccacggctccagaaccaccaagatgccagaccaatgcttgcccaccatggccaccccaycccagattgtccttgagtccttctctgggtgcacacaccctgaaggcttctctgccccagagaaggcctgggtttggagtcactccctggtgacacagga

SEQ ID NO: 37494 - DNA, 201 bp, Bos taurus
ccagcggagaagcagcgcagatgcctgcgcccgccactagcaagtggggctgggcagggaggcgtgggctgcatggcttagagtaaggataggccggaatrctctcacgggtaatcacagcgaactaatttgggctagcaaaccagactgtgggatagctaccacaggaaaagccctaagacactgccaggcccacacaca

SEQ ID NO: 37495 - DNA, 201 bp, Bos taurus
acatctgcatggccaaacccctataaaaaacaaactgggggaaaatatttgcagcttataacctagggaagggataatttgcttaatgctgggtctgtaartgcagtcccaaggccaaaccctgcttttataaactgagttttttagaacttgatttatacacccatcggtttgcatcttgtttggggctgttttcaccat

SEQ ID NO: 37496 - DNA, 201 bp, Bos taurus
tggccatgttgatagctgtggaaaactggaggtgagggatggagccctcccgggtggtttgacctactttctcgcatcctctcattttagcttctttgcayccctaagccccggccccctgtatagctaggtgaccatccctattttaaatgaccagaccagtgtacagggacgttgtccaaggtcagacagctagtcagt

SEQ ID NO: 37497 - DNA, 201 bp, Bos taurus
cagagattactagaaaggccttcagcggaacaggcctccaaatgaccataacaagacaaagtcaccacagcaacatcctggtttctgtcaatcaaggataygctcctacagtggttctggcctataattctgttcgctccctgtttcctcaactttctctcttggtttatttctactcatgtcaacaagacacaggctggt

SEQ ID NO: 37498 - DNA, 201 bp, Bos taurus
ctcccaggggatggccagggctaggtatcccctccaccagctcttctattgaaggcattttgtctagaaaacccttatggctcctggcttcttaagaactyatgacttctgctacagtggcccaaagtgagcccacgagggtccagtgtaggatgtggagacaagaggagggggtggatgggagctgtgtgtgtccagact

SEQ ID NO: 37499 - DNA, 201 bp, Bos taurus
ccatttttgcccacgctttggccacttgtactgggaaccagagtggatagcctgatttcagcacagtgtagctggtggtagcctgattggtgttttcttartcctggagtcctttggggcccctgtagggtgctaatttttaccacattctatagaatacgggatgaagtagctgaaggtagattaacaatccctgttctc

SEQ ID NO: 37500 - DNA, 201 bp, Bos taurus
ggtactgtcatgcttgctataaaaatttcccttttcttcaatccctcaaactacatataagttgtaactgaactgttcctctataaaagaaacaggtaatyggctgaaatttggctataaaacaagtattcccatccaaattcttcctatggctctctgaaattgtgatagcttgtaactctactggtcatacattaagca

SEQ ID NO: 37501 - DNA, 201 bp, Bos taurus
ggagctgcagagtgagcgggggcttcagatgcactggggcactgagttggagtaaaaagggggtgcccacagtagcactcgacagggacagactcgggccrcttcgcctggttccctgagtgcagccaagtctggattcagaagcgtttccatgggaaggctgctctgtgagtccagacgagatatagtgctagggccatc

SEQ ID NO: 37502 - DNA, 201 bp, Bos taurus
actcagtcctcattcacaaggcataaagtcttaactaaatttaactctttattagtcatatcaatagaaaagtaaagtcataattcataaatgtgacaaaygtgctcaggaaataataaatctcttgctacagaatatgtttaaactgtaactttaacatatatgaataaatgcttgggaattccttgacagttcaatggc

SEQ ID NO: 37503 - DNA, 201 bp, Bos taurus
atttgcaaactcttaaactattgttcaaaactctaaaacatgtaacagataaaagtggagcttctctgcttgaagttgaaaaagagagttccagcagtttrccctcctctgtgtttccgtattggagcctctatagcactgttggaaaaatcaatgatttaaaggaaatggtcagaattaagcctagacaaacagtgcctg

SEQ ID NO: 37504 - DNA, 201 bp, Bos taurus
tatgagtcctaacccagcatcacaaagatttacttctatgttttcttccaagagtttgtagttttaggtcttccatttaagtccatgatccattttgagtyaatttttgtgtgtggtataagtaaggggacatcaagtcatccctgtgcagcttgttgaaaacattattctttccccatagaattgtttgggcacccttgt

SEQ ID NO: 37505 - DNA, 201 bp, Bos taurus
accatggcattgttccgaattgttacgactggtgtatctcccccacgacactctaaatgcctcacagaagaaagcgtaattcactcatttttgtgactttyacagggttctaactaaataactgtaggttgctgagttagtgacataagacacttacttacagaccaaaagccctcaggagaacatataaactcaagttta

SEQ ID NO: 37506 - DNA, 201 bp, Bos taurus
ggaggcttccagatagaaatcaggctggcatgtgaacttggggaggcagggagagaactgaacacagcagccactgacccgaaaggtctggccctcagctrcagtttgcatctgggtgttctttgactgctgtccatgtggcaccgtgctgccagctggggtcactggcctgcatgggtactacgggggaggaatgtaggg

SEQ ID NO: 37507 - DNA, 201 bp, Bos taurus
aagaggagcaagtaaaattctggaggtgggagaagggaaggggtgggtgcctgtgctttgaaattctgccctggaaaggcctcttcagtggatccccttcyaacctgcccagtacaacaactggacctggcatgtgacaggcgctgtagacagatcgcatttcacacatgcagctgtaatatctggccacaggtgtttggt

SEQ ID NO: 37508 - DNA, 201 bp, Bos taurus
agcggggagctggagtccctgtgccagggtgagggcagccactgaagcagatgctgggcaactgagaagaactattgatttcagtcgctcagattcctcasggcggccgcctaccccctccctctggtgggagggcagaggtagctgggagctgtgttgcccaccactgcccatcaccagcttctggcttcaaacagaagg

SEQ ID NO: 37509 - DNA, 201 bp, Bos taurus
aaagtttctaaggtaaaaccaaatactttgattggacaagcttattctaggtttcactttgacttttaatcaagaggcagggagctttgagtacccaagakgactccggcttgcagagttgagttatggtggcttggggttctcaggctatattacaattcccgcttaaatagggtgtgaccttgagtgcacaaaggatga

SEQ ID NO: 37510 - DNA, 201 bp, Bos taurus
gatagcatcaatgattcaatggacatgagtttgagcaaactccttgagatagtggtggacagaggagcctggcctgctgcagtccgtggggtagcaaagartcagacacaacactaagacacaacttagtgactaaacaacaacaaaggccagcaattaagtattgtggcctcaccagaatgagtcaggtaaggatttcat

SEQ ID NO: 37511 - DNA, 201 bp, Bos taurus
catggtttaacaccctggaagaagcaaatcacatgtatttcttgttaaaaaaattaaatgcctttcttcctgtgtgtaatatgttttaacccactgtaagyccaatatttaaaggggactgtggtttagtggttaagaccatagactctgaagttaaagtaggttttaattcctcctttgccacttaactatctgtgtgac

SEQ ID NO: 37512 - DNA, 201 bp, Bos taurus
caatgtggaactaactcatagatgagagatgaataaaggatagtgagaaaaatttagaatgatgtgttagggacctgataaaaacagagagagcaggaagytatagtgtaagcacattaggagagcagtcctgggagctggaggagtaggagacattgtgaaaaaagaaaaccaaatctaagagtcggataggattttaaa

SEQ ID NO: 37513 - DNA, 201 bp, Bos taurus
cagtgattgattttgccatttatgtcggcaaagctggacttaagccatatcttaatgctttaaaatatctagtttgccattcttccaataatatcacactrctttttagaaaactaggaatagaagaataaggaataaacagaacctgaagttagtagaaagagacaataaagactggagtataaatgaataaaatagagg

SEQ ID NO: 37514 - DNA, 201 bp, Bos taurus
actcactacagtcctaagagctatggccaggattattatcctgttttacagatgagaaaactgaaatggacaggttcaattgacttgcacgaagtcacacrgtgaataaacagcaggccacggaggcaaggctaggcctagtgcaggtgttcgtaaccaccattaaaggttggttgattcagtgagttaaattcagcaaac

SEQ ID NO: 37515 - DNA, 201 bp, Bos taurus
attaagagtaatcccttattctcagaatggccaacattccataatatggcccacaacacccttcctctggtccctctccctctcttgccaaacacctaacrtaactgtagagtctatattctctcccaacttcacgtctttgcgtatgttgttccctctacttggggtgtctgcccctcccttctctactttgaggactcc

SEQ ID NO: 37516 - DNA, 201 bp, Bos taurus
tatatggtatttcagaaaaataacaaattggtaatattttattaaatggagatattttaaattatttacataaccctatttgtcccattcaagcatcccayagcacaagaacaaaagaagctgatttattagacatacgccagggtgaaaatttttctcagaattcttggttgggctgtgataagaacacaaatttatcta

SEQ ID NO: 37517 - DNA, 201 bp, Bos taurus
caaagagttggacatgactgagcgactgaactgaactgatgttaacaataaacgccaaaatgtcttgtcatataaacagcaatttactgagtgtctgctayagaccaagtactcttctagaagccagggatatagaaataaaacacagttgctgcctgcaagtatacacaatatattataaagttagagaaggaaggcggc

SEQ ID NO: 37518 - DNA, 201 bp, Bos taurus
tcggcgtacgcctgcgcagtcagcagctggagaggcctgcggttgagacccccagcacaactccttttcattgtctgtgctcggcgcctgcgcagtaggasttcgccgggactgggccggagcaggggtagggccgggctcctcgccctctccccaggcgcctgcgcactgagcggccgctccttgccgttaccgctatgt

SEQ ID NO: 37519 - DNA, 201 bp, Bos taurus
tttttctagactagtaaaaggaaatataaagcacaaatattttgaaactcccagtggtattttgggtaagcgactcgaactaaatttgaggaaggaatgayactccttaattctcctcttttgaatcttaattctgtgcttctttttcattttcttgacaataaagttctttttcttcccaacagggctcttagactcttt

SEQ ID NO: 37520 - DNA, 201 bp, Bos taurus
tgaactctctcattgtaattttcttatttctggtagttgccttttcttttccacttagagaatttcctttaatgtttgttggaaagctggcctgatactgmtgaattctcttagcttttgtttgtctgtaaagcttttgatttctctgtggaatctgaagggcggctgcttaaagtcttcctgaccatggcctgcccactg

SEQ ID NO: 37521 - DNA, 201 bp, Bos taurus
acccagtgggctgccaggctgtgcttcactcatgcagaggctgcctgcccatggagtaaggtccctgagcagctggctgggtggtccaggatggctggtayttatggactggtgggtgggtaagtccctaacactaataggctggaaggagaactccaaagggatgtttcccagtgccagggtccttatggcagaacaagc

SEQ ID NO: 37522 - DNA, 201 bp, Bos taurus
tccagccttcacctgactgttgagttctttcaggagaaacaaaagagatggtacaaaaagtgcagacccagcggaggacaagctcctgtgtggacctggtrtgcggaaaagcctggaagcatgagtgagcataaagatttgagagaagagaatggagtgtggctcagctggtaaagaatctgcctgcaatgcaggagaccc

SEQ ID NO: 37523 - DNA, 201 bp, Bos taurus
tcagttattcaataaatgtttattgatcatgtctgccatgccatgcatgtagatttaggcaagattgtagaactcaaagagctcaatttagtgaaaaagaycaaaaggtagaaaattcatgcatgatcagataatgaatttgcatgtccttgaaagggaaaaaatgtaagccttatgttactgtggaaataattttcatta

SEQ ID NO: 37524 - DNA, 201 bp, Bos taurus
ttttatttccactacatgtgtcacaaacacatttccagctatgtacaagcaggtcttctcactttttcagcttcatataattctccagcgtacagatgacmagaaagcactcttacccctttattaatagtcctttgtctgttacactgaagttacactgtgacttccctgctggaggtccctgaagagccactgtattcc

SEQ ID NO: 37525 - DNA, 201 bp, Bos taurus
aatataaaatatgaaaccaagaacacagtttgaaaaccatttcattacattgtgttgtaacataatcacatgctgtctctttcctctgtgaaatgtatatmatactttttagcaaaagagatagtctaaaattattatttaataaacataaaaatagcctatgtaatttattttattcatgaaataaataaatttatttat

SEQ ID NO: 37526 - DNA, 201 bp, Bos taurus
atgccatttgcaagaataataggattaactgaagattgaactatatagttttcaaggaagatttaggttttttcttcttttttaactttcatatcatgagrtataactttcatacagaatgacctcaaaccataagtatggtttacagaataattagaaaaagcaaacaccatttactgactctgatcaaaaaaagtagaa

SEQ ID NO: 37527 - DNA, 201 bp, Bos taurus
gttgtgtacctgtaaatgcaggggtgtgtgtgtgtgtgtgtgacagcacagtaaaactttttcttcacagggaacaaaattgcctattttagtcttaaagyatcccgactgaataaatcaaggaaataatccccttgagcttaattattactattctattcctatactgattgaaattattggatatttgcccattctata

SEQ ID NO: 37528 - DNA, 201 bp, Bos taurus
ccatctatatctgtatcctgagatcaagggaagctttgactttcaccaaggatactctctgaatgctgtgcagctttgggtcaacaaagctgtcttctgtkagctgccttgtttgataagacattccattcattcagttgtttgtgtgtttatgcatgctaagttgcttcagtcatatctgactctacgaccctatggact

SEQ ID NO: 37529 - DNA, 201 bp, Bos taurus
gttttcattgagaatgccatatgcgttcttgtcagaagacccttagatctactacttccctctgtgtttgatgccctcctctggcccttacctttttactrctctggtgtctgctcattcattgcttcttcagacaggtctcctttggctagctctatgaagtagcctttcactcaccttgtgatgtgatcagattttatt

SEQ ID NO: 37530 - DNA, 201 bp, Bos taurus
cagctctggaggctggaaggccgagataaggtgtctgcaggtctggctttgcctgagggctcggtgtttggtttacagacggccaaccttttcactgtgckctcatgtggcttttctctggtgtggtgtctctctattttgtcctaatcgcctctttttataaggataccggtcagattggattggggcccaccccaaagg

SEQ ID NO: 37531 - DNA, 201 bp, Bos taurus
ttaacatcagaacttccacttttcaataagaaggccttcattcaatgtactttgtttgggggtggtatgagggaattcactgttcgctggtcacaggtacraatgtaatttggggctggcccagctgagctccccccatcgcctgatatgaccttggactgtcagcctccatctttgttattatgtggataggattttcta

SEQ ID NO: 37532 - DNA, 201 bp, Bos taurus
aaacagagctttgggttacctgcatgattctgagaatgtaatgcgcctaacccaaccctaccttcagttatgtatgttttatattacaactgtgtatccckttggaagaaatgtttttgaagtggttccaggtgtgtgtgaagtgatgacacttgtctggaggccgtatcagtcacacaggtcctgccctgtgtctggatt

SEQ ID NO: 37533 - DNA, 201 bp, Bos taurus
tctgtgacatgggcaccattacttgtgggaaaggaaactgaggctcagaaatgttaagaaattttcttaaggtcacacaactggttaagtagttgggccargaagagactttagtgtgtgtatgtgtccaaatcctatccaagacaggaattatttcttcgacatctctcatagccattagactctgtgaaccatatggtg

SEQ ID NO: 37534 - DNA, 201 bp, Bos taurus
tgatgctaaatgttcagatcataccagcatgtactgcatatataacactgagaggagccttatttagcccagagctggttttggacctattgtttccaaaytggtttctgagcagtaaaatagaggtgagtaaggttataaggcttctgtctagtcatcatcagaccattttactatacagtttcaaggagctgactacct

SEQ ID NO: 37535 - DNA, 201 bp, Bos taurus
agcaggtttggtgacaacacatgaggccttgaggaatgggagaagcacaaatcccagggaaagagtgcggaatgagacagtggaagctgagaaatccatcygacttccatgagaccttgcaagaaccctactgtgcccacctccaccctttcctcctgaacagctcctccccttcaaatgcttcagaagcttgccagggaa

SEQ ID NO: 37536 - DNA, 201 bp, Bos taurus
caaggatgctcaccgccatgggctgactcatgttcttggctagagaagtggatgccagctcagtgtcctagaaagcctgctctccttctgtgaagttggarccctgaaatgtttatgccggagagctgggaaaagctggaagaataatttctaatatgctcatctcttattccctctcacccctatttccacctctagccc

SEQ ID NO: 37537 - DNA, 201 bp, Bos taurus
atttggtgctcatactggctgaggcctcagatggggtgagaaaggatggcattgcctacagaaggcagcttagctcagtctacattggaacacacatgcaygggcctcagccaggtctgacgagtagagtctgcagtcttgaaaaactaactcaatatctgtgagtcatttttctcatttgtaaaatgagattaatgacag

SEQ ID NO: 37538 - DNA, 201 bp, Bos taurus
ttattcttttgttctaagtagaaatgtctgacttgtttccagactgaagaacttgggacaagttgtgttgtcaacatccaatgcaagttatcagaatttayatatactcaaaggccaggtcctttttaagtctatgattatatactatgtttggcactctgacctggaaaaaggctggatcttcaaaagaagtcctgaaag

SEQ ID NO: 37539 - DNA, 201 bp, Bos taurus
tggaatttgtctttttaatgagctctcgcacccccattcccaccaccatgatgttcatacataaccaaatctagaaccacaggccaaggggcatatccatyccctgagaacaagtctgattcatattcttccctaactgagtgaagcagaataagacaaggttcctctgccctgtacctggtgtggccctggctcctgggc

SEQ ID NO: 37540 - DNA, 201 bp, Bos taurus
cattcctagtctgggaagtaacctcctgcaagtcacatggcacagccaaaaagaaaagaaaatccagtatgcaagtttgtgcctatttcttccctgagctyggctccagggttgcatgcatgctaaattgcttcagtcatgttagattctctgcgactccatggactatagcccatcaggctcctctgtatgggattctcc

SEQ ID NO: 37541 - DNA, 201 bp, Bos taurus
gtttattgagagacagggtcatgtttaaggttatagtctccatgccacagactgtgtatgacatataacagagaaaacttatgactgagtaactaaaatamatgaataatgaatggatacatgaatgaaaaaaatttgcatacatatatgacccccaatgtccttttataatcttgaaatatagcactaaattagctacat

SEQ ID NO: 37542 - DNA, 201 bp, Bos taurus
tcttgcatctgtattccagggcctgagcgctccatcactgaaaggatccaagcagatggggagtccttttttcaaagttaatactctttagaggacgaaaytagaggaagtgattggtaaggcctcttccaaatctaagactcaatgacaaaattaaatggccaccaacatgtcttctatatctggaggccaaaagagaca

SEQ ID NO: 37543 - DNA, 201 bp, Bos taurus
ttatttttcatttatactttttaatgatttgacaagtatttattgagggctgacatgatccaaaaccagccttgtattggtgacaacacagtaattagtgytcaaacctagggaaatgttagtagggattggaagtgggtcataatgccagaaattagcaattaagagggtcagttagtccatatttttgtggggaaggtt

SEQ ID NO: 37544 - DNA, 201 bp, Bos taurus
gcaaagggacttacccatacatatacctgtatccattcttaaccttaacctccacttacatactccattcactgttgcttgtaagttttggtactgtattkattcctgtgctagatgtctctgcctggatgccttatctgctcttcacactcaacttaccccaaattaaatacattatttttcttccccagtcagcctttc

SEQ ID NO: 37545 - DNA, 201 bp, Bos taurus
tatgcagcctggatggaacttggacagacctgttgctggtcactttgcttatttctgttttatccagagtttgcagcaatcatgatctgaaaggatgaagytagatttggcgggttcttggggttctcaaggcaagaatactgaagtggtttgccattcccttctccagtggatcacatttttgtcagaactctccaccat

SEQ ID NO: 37546 - DNA, 201 bp, Bos taurus
atgtctgacttgtggtaggcagttcttggtggaatgatgatagtagtaagcatgttgattttttctcagacaggattagtgtttttccttgttcctttatktttcagaaggctaggattgatgtgcatttgaggatgggagaagcagaaaatttgtattatgaaagaaaggttattgtaaggataaaattaaacatccttc

SEQ ID NO: 37547 - DNA, 201 bp, Bos taurus
tagacgtgctaatgaactggatagagggagagagaaaatgggaagaatcaaggttaatgcctgcatcagtgtatagcgatgacaaaaaaaaaagaaaagcygttcccatgagctttcattctagtgagaggagagagggatacgttccgttagtttcaggtatatagcacagagttacacacatgtaaagttataaattat

SEQ ID NO: 37548 - DNA, 201 bp, Bos taurus
ccatcaaatatcgtctactcttgcccacttctgattcatattctattcttcattcagactgatctgcttctaaaaatgtcaatcaaatcatatcactctaytgtttaaaatccatccaagttagagtagatgtctctgttgtagcactctgaacttcaccttagcatttgtcacagctgcaatccatcaattattcttaca

SEQ ID NO: 37549 - DNA, 201 bp, Bos taurus
gctcaactccggaggggaatttgtagacctctgtcagagaaaatcataagacagagcgcaggcagcaataccgtggcccacgaggagttacgatgcacagyccctgacaccagctcttaggacgtaacgtatgactctggagaacacgaacaagtgctcaacgaacatgtctaatgggcctaatatgtgccaggcctattc

SEQ ID NO: 37550 - DNA, 201 bp, Bos taurus
gttgaacctatgtgagttcaaaggcctcatgggtctgctgtctacagccataacagcaaagcttctaattatactttggatcagttaaaactctgaacaayccagaatgatggcctagatcctgacttgattaaataaggaaagggctaaattattacactgacaagcaggtggcaagacaaacactggtcctctcctatt

SEQ ID NO: 37551 - DNA, 201 bp, Bos taurus
tccttttctcttaaaattttcaagccattcttttttcttacccttctcctcttattggggtaactaacaggcactttacccaaagtgtgtcctctgttttrtcagaagatctgactctacttccccaatttagaatcttattctgtgcttcaacatatttttcaactgttgtttttatgacagttatataaatcaatgaac

SEQ ID NO: 37552 - DNA, 201 bp, Bos taurus
actaccctaaaaatgctctgtgctccacatattctccccttcccacgccataacccctaacaacctctaatctacttcagttttgccttttctagatggtyatagagttggaatcatacagtatataacctttccagtctggcctctttcatttagtaatatgcgtttaggttcctctatgtcttttcatagcttgatggt

SEQ ID NO: 37553 - DNA, 201 bp, Bos taurus
tgtaccacattcaacaaaattgcaggaggtctgtatatctgctcttctgttggtcttccttgagctcttaataactgcctcatgtggctcttcaaaatgakaatcttgatgtcaatcactgtacttgaatattaattttatattattctgggctcacttcagctaaagccgattttaaatgtggttctagagttgtctaac

SEQ ID NO: 37554 - DNA, 201 bp, Bos taurus
agcgaccccatggactgcagcctaccaggctcctctatccatgggattttccaggcaagagtactggagaggggtgccattgccttctctggataaccacyacagtgttggctaatagagccttcatgtacaaatttccctggaggcctctataatctgctcattttattttttatgttttaatttttttacaatgatttt

SEQ ID NO: 37555 - DNA, 201 bp, Bos taurus
aagcatagtttgagaagcctatcataaatagagatgcatggagacgctgagtttctagagagcttatgtatcataagtaagactttttcagttgatttaargtcttcaggatggtctaagcctgaaaccaaaaagaaaaccaaaataaagctgataaatttgactaccaagaaatgtaaaatttcagtttattttacaaaa

SEQ ID NO: 37556 - DNA, 201 bp, Bos taurus
tccaggacactttcttttcttctttcaaggcctctcttcctctcttcttcctgcctagctcctcctcattagtgaggttcttgtgcttaaatactgtgacycaatcctccataacacttcctacattcctatcaaaagtacacaggaaccagtgattctaaacccctcccttccttggtaggaaatgtatctgtgctgaaa

SEQ ID NO: 37557 - DNA, 201 bp, Bos taurus
ctcagtctgccagacaagacctggggccactctggaccagggtaattataccccttctcaacatatatctatcccaggccagacttgaactactctctggrgggatgaagcaggacagtgttttccagtctgcctttaccgtaatgtgaggccacttttgcgagctcctaatcccaaacagtttttcgtgaaaatacaaca

SEQ ID NO: 37558 - DNA, 201 bp, Bos taurus
ataattaccacttctggtcaaaggtgagagggaaattagcatcacaatggcaagttttctctctgggtgttgccagctcacacagttccacgggtgattgyagtgtgttaagcctccgtttacaagcaggaaagctcagcagagcccatgaggacagcattaaaaattcctaatcatagacaagcatttcagacattcatt

SEQ ID NO: 37559 - DNA, 201 bp, Bos taurus
agaccatggattcctaactgagtcacatgagcactaaatcctttcatatttcctttgatgtgtgagtgtgtgaggtggggtgtccaacctctctctgggcycttagcttcaaggagagagacacagagaatggagagggaagaaaataaccatctagctgctcaaagtataaaaatttaatagtagtggtaagtgttgagt

SEQ ID NO: 37560 - DNA, 201 bp, Bos taurus
tgtatggtttgagcttgtgatttttttcaaagaagaatgaaaaccagaatttgacattcgagatttgaaatccatttcaaaatcattttataacagacccrattgtgactcagcagttatttatcttactcttgtcttttcttttctgttcacccatagattataaaaaattgaacagagtcaagtgaattaccagagaac

SEQ ID NO: 37561 - DNA, 201 bp, Bos taurus
ataccccaggcagaggatcaagtgcttgagttttcttcgagtctgatttctgacatttgactgatttatgcaatttactttgtagccctaaaatatttaayagacggtctgatttcaagaccttttcaaatgaaaagaacctaatgaaataatgtaaaatcaaaatatttctttacccattataaaacagcactactatct

SEQ ID NO: 37562 - DNA, 201 bp, Bos taurus
agatcgcagaggaaatgtggaggaatgtgaatggtattattttatccagcaaaaaacagagacttgtctgcttctctttcccagcacggcctcactacgaygtcataatgttcgatgtggacagtaaggacccaaccctgggaatgagctgtccacccccagcatttgtggcccagcttttcctgcagaaggtcaaaagca

SEQ ID NO: 37563 - DNA, 201 bp, Bos taurus
ctttggagtcagttgaagagtaagaattatagatgtattttttaaatgatagataaatttgataatatttgtaaagcgtgttataaattggaaaggattayagaaattattcttctgatgttaagactgaggaagaagtataatcatagcaaagaggagcaaagtaattctataattattagggtctgagtcttgtgtttg

SEQ ID NO: 37564 - DNA, 201 bp, Bos taurus
caggaaaaggaaggggtttgaaggaacggtataattattcatcatagtctgtataaatgtattctgtttaagtctgaattatttacttgctgctgtctgayaaagctgcttagagatttactctatttaaatgcacagatcttttaaggacaaaaggacgttattttgttaatgctaaaaaatcaacattagccaaattgt

SEQ ID NO: 37565 - DNA, 201 bp, Bos taurus
agctatttggcttcattccagggacatctcaactttggaatttctctggtgggcatcatctttcagctgcttttctctacctcctcttctccagtgcatcrttgcagggtcttgagcttctttgcaggaagcactgagaggaacagcttgttttttttaaccacagtttagcaactgtgccatttattggcctcttgggaa

SEQ ID NO: 37566 - DNA, 201 bp, Bos taurus
tgcattctttggcaagacatttaactaactgcctggccagtggagtgcagaatagtaaaattaggcattgacaaatgtttgcagttttgaggaagacttgytcctaaacttcttgggattggcctctgctcagtcctgtgtctcagcgaccatcctatgggatgtcatatggctacagtcaggaaacccttacaactcaga

SEQ ID NO: 37567 - DNA, 201 bp, Bos taurus
atttcattgagcctcagctgttcctctgtaatacacagtgtctcagtattttataatattgaaaagggcagataaattttcaacatattcaaaatatgtcraagcttgctcaccaaataccaccaacttgaacaaatatgtcttctctggggcttttaaagtgtgatttatatatgagacaaagtacaaaggagctggcca

SEQ ID NO: 37568 - DNA, 201 bp, Bos taurus
gtttccatgttaatttagaatcatttattaagtgtttcattgaaaaattattaggcttttggttgattacattgattctatgtatcaatttgggaagaacstagcatctctgtgtactccaaaaagccaaacttttgaaagttttatttctagaatatttttcgatgttgttgaaaattgcgttttgtgtgtgtttgtgtt

SEQ ID NO: 37569 - DNA, 201 bp, Bos taurus
gttgtcacagtagttactggaaagtgtttggggacagcagaagtggtttgggtttttcctacagctttctgctgttcacctaaaaatcaccagtatcagcrttgttggaagctgaaactactggttgtagcatgagtctgaacttcaaagtttcctaaagttgttcttgctgacttttgtttgcccaatctttaattcctg

SEQ ID NO: 37570 - DNA, 201 bp, Bos taurus
tatttcaaggcaaaatgaaggcacatatctttaggaacatgagattatgacaagcttgcctcaaaatttgattgcagcatcattaattctgccattctgtragcatccagtcagggatttatacacctgtttccctttcctaaatacagtcttccaaaccaactgggggttttcttgggacctcccttctcatttctcttg

SEQ ID NO: 37571 - DNA, 201 bp, Bos taurus
gaggattagcaaaactgttcatttaagccaggagttgtacctcatgaaaatgaatttgttctgtcttgatccagtggtggtgttggaagggccaagactcmggagtccagacttgattattttcacacagaatagatccaaatgccacatagtcaagtaaagtacaaatatgagattaaaatgagcctgtgctctgctggc

SEQ ID NO: 37572 - DNA, 201 bp, Bos taurus
gccctctgctagctgtgagagaatgcacgtaagggggtcaggtcctagagggcagccttcatatcttttgctggaatcatcaaggccctgaaatgaggggraaaattatttttaattgcatgtttatgaactattgcaggagagggaagtgtaggagagggaaaagtgttcatccaccctcttaggttccctggctggcct

SEQ ID NO: 37573 - DNA, 201 bp, Bos taurus
ggaaggggtggggtgggagagcagggcaggagactgggagcagggcagggggcgagctgggggagcagggcagggcaggtagggccagcagtctctagaaycggctctggctttggctccaagtgaagctgggagctgttgttctgcaaagggaagtagaagtgacaggatctaacccaagtcacttagggccaggtcact

SEQ ID NO: 37574 - DNA, 201 bp, Bos taurus
tgccttatacagatggtgaggatatctgtgcaagaaaaatgagctaaaaacttcatttaaatagctttgggatagtatctttttgaatttccagagaggaraacccacaactgcatatgtaagagaacaggaaaggatgttttcattttttttataaatgtgcttagtatgactcaagggtaattgttatgcaaaagagag

SEQ ID NO: 37575 - DNA, 201 bp, Bos taurus
gaagatttcttctggcccttacaagtcttgtctgggagcagtttgaaggacttccttatccctgagagagagccaagaccaggagtggagtgacacctccktggatgtcccctgcacaccccaaatccagtgggtccccctgactcattccctccaagagctccccatgccagggagcagtaccaccaccacccccccaac

SEQ ID NO: 37576 - DNA, 201 bp, Bos taurus
agggccatcagcacaggccaccggtggcaaagatccaagtcacagcagctggggttctgctgaccgagttgtggctcctccctgtccacactcacggcatraggccagcaggatatgtgacaagattttcctttcaggctgaatagtagaaagtcgttttggcttaggggtgcagggtgttaagagggtcaggagatcaga

SEQ ID NO: 37577 - DNA, 201 bp, Bos taurus
atcgtctcagaggcattgttttggttaggagggaagatgacaggactgcagccaaccaaagcagaaaggcggagaatggcaaggggcctgcggttttgttyacgaacgctcttctccaaggctgaacttcttggaaaggggtttattttgtttcacgctgacccagctccacttctaggtcattttaggatctcagttggt

SEQ ID NO: 37578 - DNA, 201 bp, Bos taurus
gagttggacatgactgaagtaacttagcacacacacacataggtatggccagaagcagacaactctttacaatttctttttacaaaaagctttttatatartaaagcaaacatcaggcctggacaacagttctattggttctaaaacagaatccacgtgttgtcttggaaacaatgaaattgtgtcctgctacaacaggaa

SEQ ID NO: 37579 - DNA, 201 bp, Bos taurus
ataaaaataatctttttagacttttctatgtcaagtatgcattttacaatctatataagcacattaaaaaagaaaaacagagggtaaaacttctaaattgkgatgagaaaaatataataagtaccaaaaaagcctttcctttctccaggggatcttcccaacccaggtatccaacccaggtctcctgtattgcaggcagat

SEQ ID NO: 37580 - DNA, 201 bp, Bos taurus
caggcgcagcttccgagggtgcggacagatcaactatgcatattttgacaccccaaccgtctccgccgtggatctcagccaggaacccgaccaggctgccrgggcaccgagtgccaacccccctccgccccaggcccaccggagactgaggaggtctcactcaggccccgcggggtccttcaacaagccggccatcaggat

SEQ ID NO: 37581 - DNA, 201 bp, Bos taurus
ggaaaagaggaacaaggggactgtctccatggctccctaagggtgagaacacacggggtcagggtgataccaaggaaaccagaccataccctgtcttcccrcaggccccaaactgaagttggcacaacattccaagatgttctctgcagcgcccacctctgccccagccttgcaacacaccttgttagcccatgtaatgat

SEQ ID NO: 37582 - DNA, 201 bp, Bos taurus
gcaactggttccttccaaattgtcacataaagatttggtaaatgtcagacacatcatttactagaaaatgatgtttcactgccaggggaggtaggtggctragagaataaggtaaaaggcccagagatgaccttaaggcagctcacggcatgcagtcctctagcctggggctcctaacttgggtccctctcgcctggcagg

SEQ ID NO: 37583 - DNA, 201 bp, Bos taurus
cattcccccccatctggtggccaacaggtcctccagaccatgtacagattgcttgttctccttcttcctacccgttggcagcttccagaaagatcctaaayagggcctagcaggatgtgattataattagaacaataaaatattcatcatctcaataatagccagtatttactcagcactcgctgtgtgccaggctctatc

SEQ ID NO: 37584 - DNA, 201 bp, Bos taurus
gggagaaacaaggggctgagaggagaaaaaacactccaaaggatctgtaaggagagaggggaagactggggcatcacaggctgaccatccacgtgctgtgygggcactcacatctgtcccgtggtctaaagcctgtgattctgaggcgtgtcacctggctgccatggcaaccagggcccccgtttcccgggagaggacaac

SEQ ID NO: 37585 - DNA, 201 bp, Bos taurus
atgatgtactatgaacgctagaatttaagctggaagaggcagagaggggctctctgagcaaaggcacccatggtaaccagggattagctcataagtgctgygatacaatgggcagctgtgggtaaggagcagcaggcggtcacagttccaaggtaaactgagggtccgcagcagtcagagaccgagatgtgcaggtgagtg

SEQ ID NO: 37586 - DNA, 201 bp, Bos taurus
gcaggttcaatccctggtcggggaactaaaatcccacacgatgtggggcatagccaaaaagagagagagagaaagagaaagaaaaggccaggggtaacacrgacagaagaggaaaagcctcagtatcaatagtttatcatgatggatacgctctgccaggcgcagaacacgttacaaggagctggcagaagggccaggcag

SEQ ID NO: 37587 - DNA, 201 bp, Bos taurus
tgaccggtggagctttggggggtcttcctgaggtgaggagggggccattagggtacccctcaagttccagtgtcacctcatactgtgattagcaaacaccrcaaggctgaattttgaaattgttttctttaatgaaccttaagctagttactacctttctgctttgggcatttcaaacgattgggtcttgaaattttaatg

SEQ ID NO: 37588 - DNA, 201 bp, Bos taurus
atgccaccgcggggccgctcgtgctgtacttcgctctgcaccgcctggtcatcagaccctacctcagggctcagaaggagaagtgagttctcagcactgcyggggacggggccgaactgccctgtgcccagctcccccgtctgtgacgtggagagggtagcagccgccccacagggcgtgagggaaaccccctaagctgat

SEQ ID NO: 37589 - DNA, 201 bp, Bos taurus
cccacccccttggccatgaaagcacagagtcctgaccactgggaattcaccctttacatgctctcccatggagcaaatctctccagactccctcaccccamccttttggtccccatttcggtaaaggacaccaggccaccctccctttagtccaagctctaggagtctttggaaacccttgacttcttttataagtctgag

SEQ ID NO: 37590 - DNA, 201 bp, Bos taurus
catggaatggcaaagagtcggacatgactgagcacgcacacacatttttccatgcacttatcagccatttgtacatttagagaattgtctattcaggtctrttgcctgtgttttcagttggcttgtgtttttattattgagttgtaggcgtctcttctgtattttttttttttttggctgtgctgcgttgtctggtaggat

SEQ ID NO: 37591 - DNA, 201 bp, Bos taurus
gcggaggcctctcgctgctggccaatgcctggggcatcctcagcgtgggggccaagcagaagaagtggaagcccctagagttcctgctgtgcacactggcrgctacccacatgctcaacgtggccgtgcccatcgccacctacgctgtggtgcagctgcggcgccagcgccccgactacgagtggaacgagggcctctgca

SEQ ID NO: 37592 - DNA, 201 bp, Bos taurus
attcagagggtgcaccctggcaggagttcacagcccagtacacagggaggtgcagggtgaactgggctgcctcctggagccactgtgataagggtcaggaygctgaaccatgagaagtctagcctaaaccagagaacctgaaatagggatctgctggagtgtctgggttttattgatgataaatgattacaaattaaaaaa

SEQ ID NO: 37593 - DNA, 201 bp, Bos taurus
ccttccatctgtgcgtctccctctgtttttctgtctcaagtctctctctgtcctgctcttgtacaaacacctgtcactgggtttagggcctccctggatcrttaggtctcatcatctcatggcactcagttacctctgcatggaccttttctctgaataaggtaacagtcacagagtccagggattggggagcggacatgc

SEQ ID NO: 37594 - DNA, 201 bp, Bos taurus
gttggggaggagggaggtcctggtctgcgcctcctcctctcatccagctcccctgctgctttgtattttcattctcgtctggtccaggagtggtggccttyctgcttccagccccccttggctgggcgggtctgcgtctgtggtcagtttagccttcacagaagcctgaatgaggtatgggcctctgtgaggtgtagggat

SEQ ID NO: 37595 - DNA, 201 bp, Bos taurus
taaagtccccaggagcgctgtgagtgcttggctgctgcacctccagctgtgcccgagagggtcgcactagctttgtctggcccagcatccaggtgagggtkaaatgccctggtgggctggctggcatgtcagtgggtcccagtgtgtttctctcgggagtttgtcctgggcctggcagaaatctgaggctactggagggga

SEQ ID NO: 37596 - DNA, 201 bp, Bos taurus
ctggggaggctggaccatgagtgcaaagtgaatgggacctgccaaggagcccttatgagatgttagggaggactctcctggtggggaggtgagggtggcckggaactggacatcattgcccagggggagcgttttattgtctcaggaacatgagggtggaaaggaccaggctttggagtgaggccccaggtcctactcttg

SEQ ID NO: 37597 - DNA, 201 bp, Bos taurus
gggacccacagcctgatcttcttccattccttccaggcccccctggcttctaagaatctcagtaccagctgcagactggacaccattctcttgcaacacaygaagtatggccaaagagtctttgcagtggctctgttgtgactgatgtaatttaaaaaaattaaattaattaatttattatttttgactgccttgtgtctt

SEQ ID NO: 37598 - DNA, 201 bp, Bos taurus
gtccgagtccccatgcagtacctcctcctcctcattccacatctgtccaaaagggcgaggagactttgcaatcggatctcaggctggccgaagacccaggygtaatgatgttcatgtttattctggagggagccctttccatcggcaaatattagctaatccttggcttcgctctgggagagacgtggagagttagacaaa

SEQ ID NO: 37599 - DNA, 201 bp, Bos taurus
agaggtggtgcagactacagatttcccagagggtccaaatgcaaaggcccccctcccaccataaaaactcccatagctgagagtctgggaggctggcccaygtgccaggttgccatggagagtgggattcctcacctgtgttagaacctcagggaccccactcctgtcactcctgcagccaccgtgacataccctgtagtg

SEQ ID NO: 37600 - DNA, 201 bp, Bos taurus
catcaaccatctcggaagcctgggggactgtctggagcaatagcaaggtcagagaagccccctctcctgtccattttggaacccgacacttggtgggttaygaggactgatgcccaggtgaaggactgtgggtgtccagctgtaggcgggcccagcacacccttaagactcctcccttgtgatctgtgatggctttggtgt

SEQ ID NO: 37601 - DNA, 201 bp, Bos taurus
ggagtttggcactgaggctgtcttcccttgacagtactagctttaagaggaaccgtggctggtgggaccgacgaatgagtctgaatgcagagaggcatccygaggcccccagtgactgcttctagaagaagggtccaaggaggtgttctgtgccctggctgccctgtggcaggttttgctacagctggagaagtagcccaa

SEQ ID NO: 37602 - DNA, 201 bp, Bos taurus
ttgaaagaatgacatagctctaggcaacaacataaagtgatgagaaccaaatggttccaagactgcagccaagttgactttcactagaccttgggccacartgtaagctcattttaatacatcagcatgctaaatgacatacaggtgccatgactgttccacaattgactgtaaaggtcagtaagtgagcggtggcccaac

SEQ ID NO: 37603 - DNA, 201 bp, Bos taurus
aagcggcatacttaacataaaagcctgtttaattgctagcaagtggtagaataatcttttgaaacaatatagcaaacacaattaattgaaataatctcaaygtgtttcatgtggtaataaccacttatgtaagagtaacaccataggaaagaaagacaggagagaggtggtggtgtatgtcttaagtggcaagctttacta

SEQ ID NO: 37604 - DNA, 201 bp, Bos taurus
gaggatgatactgcggctgaaagttattagctctccagtcacatgacagacagctgtagaacttttaaaaaaataaaaagaaagctaaaacctctgagcaytctttaacatcagctgtcagctctgacactgggctgcagaccaatattacatggcagctaataaagcaatgagcttaaattgggtataggctattgattt

SEQ ID NO: 37605 - DNA, 201 bp, Bos taurus
tcggggaacccagggcagctccgggttgcagacccctgaggacaaggagcagcagccgtgcaggctccgatggccattcgctgggcccctgtctttaatayaagaagtcacacatgtcgtgaagggaggaaagctctggatgcctttgcagacccagctcagcatcccagaccctgaggagagggcagggtagtggccaga

SEQ ID NO: 37606 - DNA, 201 bp, Bos taurus
ggctgaactattattattttacctagcttgactgttttcctttttgcattttgtcacttctctgattaaatattctttggaattcagggaaggcctaggargctgctgttattctatagaggggcaggtagaagacactggggggaggtggtctgttcccagaaggccccatagggtcctgctcagttccaggggtacaga

SEQ ID NO: 37607 - DNA, 201 bp, Bos taurus
gtaagaagtatcaagtcaccaatgagttattctgctgagccttccatcctgttgttccaggcactcccatccaaacccactcactgacccgtgagtcagcrggtggatgttgcgagacctgagcacttagtttaagtttttaaattatagtttcaaatgcttaaattgcaccaacatttctcctagtctactccctgttat

SEQ ID NO: 37608 - DNA, 201 bp, Bos taurus
agtctcccacagcagccaaaatcagaatcatccagcccacatggccagcggtgccagtgcccagggctcatgtggtgcccctggccaccccaggagcagcracaagctgcctccagccctggctgctctccatccctcccagacagaaagctggaagaatgctctacccaagcctgggagctttgggctcagagtgggtca

SEQ ID NO: 37609 - DNA, 201 bp, Bos taurus
ttctacagagcacagaagggccactcgggaacagggcatgaagggctaggaggttgggctctcccggaaagctagcagaaccttcttgctggggcctgggragccagctaagctgagatggggcattgcagtatgtcagtttcaggctgatttggtttatatttgtgacttgggctgggtcactggggtggcctccactct

SEQ ID NO: 37610 - DNA, 201 bp, Bos taurus
tgcctagaaaggggtcaggccctcagtagaccccgggctgtgatgccttgccaggtttggggaccctgcttgctccctcagaggaaggggactctcacagyaggtcacaagttctgccatggccccagcctagggagagaggaaattccacacaggccagggtctggtaccaggaggggaggagcctgccctcaagggcag

SEQ ID NO: 37611 - DNA, 201 bp, Bos taurus
gttaaacactttgacttttcgttctcgatacaattcttctttaacttatggagtaagtcaaaagatgagtgctacacttccggggaacagtgcattccccycaaagctaataatacattaaggtgaaacaaaagtaacaatgacagcaaaaccaacaaacaaaaggctcccaaatgtacagcgttcaataaacaggttaca

SEQ ID NO: 37612 - DNA, 201 bp, Bos taurus
aaaaggaagctgactgacttattcattaggataatctgggcccgtgtgtgaggtccagtgatgaaagaaccttccgtggcctcttgggcctttaagaagcyccgttgaggtggggggggggggggcttcaccatcagagcccagccagggtggatggaagggtcacatgcccacatgatgtgatctcacatgttgtccgga

SEQ ID NO: 37613 - DNA, 201 bp, Bos taurus
gaggaaacaagttctgggaggttcctcagctccccaaagcccctccgctgaccagtggacatccaaggcctcagactttgcctgtacagtcaggcctggartctacagctccggaaagcaatgtctgtacctctctcagctgactgggtcttttaggagctgcccatccacaccaggggatcccagcactgaacatccaga

SEQ ID NO: 37614 - DNA, 201 bp, Bos taurus
gtcttaaccctttggggtccaggccagtgaccatgggagggcctgctccctgccgaggcaggcgtaagcactctgcccaccaccgagctgccagaagagcmcactgactggcgactggccagaacagcacccagaatcttccaggatgtgctgcccacccaagcatctgtccatctttgaatgagcagtgggaatgagggg

SEQ ID NO: 37615 - DNA, 201 bp, Bos taurus
attatcacatggtattaccactatgctctccagagggagtaaaccctgggttcacatcccaggtctgcaactttgtagccctggggcccacaagcaacttrccccacccctctttaactctcactctttgcaaaatgtgaaggataatggaaaccccaggtggccaacacggtgcccataaagcacttggtaaagcacctg

SEQ ID NO: 37616 - DNA, 201 bp, Bos taurus
attcttgtctggagaatcccatggacagagcagactgacgggctacggcccatagggtcacagagtgttggacatgactgaagcaacttagcacacaagcrtatgtaaaactctagaagaatcaaaatggatctacagtgataggaatcagacccggggtggcctaaggtggagggtaaggaaggattgtctgcaaaggat

SEQ ID NO: 37617 - DNA, 201 bp, Bos taurus
acagaccctcccacttccccagccagcggggtcatctccacccccctctcacactcatcattacatcacacacatgggaccacctccaggaggcctacagrcaagtcaaccgctcttcacaccaacacctgtcctgtgctcaggtcatccaagaaccaagtggggagggagctagtcccctcagtgcacagcagcgtaccc

SEQ ID NO: 37618 - DNA, 201 bp, Bos taurus
cttctgtgacaggcagcatggtagcccctgagaagcctgttttcaacaagagacattcctttcagagtaaccaaccaacatccaagcggaagccacgtcakggcctgtccaggtggagccgtctctgaaccccaagcagccctgagccggggccccacaggacggctccatgcactccagggaaagcgccagctccttcct

SEQ ID NO: 37619 - DNA, 201 bp, Bos taurus
gggagaggacgccaaggacagctgaccacaaggattgcagacctgccaggctgtgaacttgtgtggaccccaggattcaatttctgcaggtcccattctgrccaaattgcattcccccaaacccaaatgctaagtcctgacccccagtacctcagaccgtgccctcatttggaaatagggtcgctgcagatgtctgaagtt

SEQ ID NO: 37620 - DNA, 201 bp, Bos taurus
cggctccaggcagcgctaccaccaccgatgtgccatgcaggcctgctggtttccaaaacacccagagcctgcaggcctggccgccccaggagggccagccygggggcagcatgcgctccatgcttagcctgcactcctactgcctggggtcccagcccaccacttcctctttcttctccctgggtcccatgcctgccggcc

SEQ ID NO: 37621 - DNA, 201 bp, Bos taurus
gcagtgacttcacggcctggagctgacctttttatgtggtgggcagtgtgttgcctatgaggttttctcctggccgttgctgtgccccagggtggggtccrtggcacttagctgtgctcagaatgcatctgcgagtcctctgagccccctacatgtgtgctgcttgactcttcagatcatgctgtcaccagaggcaaggaa

SEQ ID NO: 37622 - DNA, 201 bp, Bos taurus
ctctgggagttggtgatggacggggaggcctggcgtgctgcggttcatggggtcgaaaagagtcggacacgactgagcgactgatctgatttgatgattcyggccaaaatgaagtaacagggatcagaattactctttcacctgaagcaactaaaaaaccatacaaaatatgtgaaaacagttctaaatacattggctgca

SEQ ID NO: 37623 - DNA, 201 bp, Bos taurus
gcctgaacaggtcagggaactggggaggagggcctggctcctagagctcagtctgctggtgtatgactggggtacctcagggcacagctcttgttaggagytggggagacagaagcttgttggcccccatggtcagggaagactgtctggaggaggaggcagcgatgaccttgggccttaaagggcaggtgcttttggagc

SEQ ID NO: 37624 - DNA, 201 bp, Bos taurus
attttggccacattcagcagcgtgtggaatcttagttcccctgccagggattgaacccataccccctgcagtgaaaggcagagtcttcaccactgggccaytggagaagtccctccaggactgtattttgtccctggtggagcttgaagccctaaattcctaaaggcctttcaggggactgtttaaaacagagagggcaag

SEQ ID NO: 37625 - DNA, 201 bp, Bos taurus
ctccctgttcccatccccaggactgatcaccagggagaagatgctacagaaggatgaagggtggggggagggaacctttgtggccataaaccattaattaraggcaatttccaaaatgtaggcattatggtgccagattttatgtctgggattccatcaatcctggcctttatttcccctctgtctcagccctgagagtgg

SEQ ID NO: 37626 - DNA, 201 bp, Bos taurus
ggaacaccttgctccactgcgagacaccaggtccatgtgggtgggtagcaatggttgtctggaagccccaccttttcaaggcctcacatgctcctgctgckgtttacgaggaaggacacacaggctggagacaggagtctcctgccgtcactccacctccctctctggcctccctcatccttccttctggagccgccaccc

SEQ ID NO: 37627 - DNA, 201 bp, Bos taurus
ccagaacacagtaggtgctcaatacataattcctgagagtcgtgataagagaagtgtcatggaagcacagtctccaagagagcttggcaagcctgccagcrgtggcccttcagggtcagcggggctttaagtgaagaacagaaaagagggttgtaagcagcatgaccagctttgagaagtccgagggaggcttagagaatg

SEQ ID NO: 37628 - DNA, 201 bp, Bos taurus
ctccaccaagattcaaacagcacctcctctctcacgtcctctcctgcttggctgcattcatctaggtttctctcccattggccgcagtgaaaacagcacarcattgacaagcagcagccatctctcccttccaccatcatcatcaaatcctgactgaagaatctgcaggaaacaatgtaaccttgtctgcagtcccatggc

SEQ ID NO: 37629 - DNA, 201 bp, Bos taurus
gcaggtggattctttaccagctgagccacaaggggagcctctagatggggagggctcagcccaaacccccatctggccataactgttacagatgcagaagmctgatttttattaaaacagagaagcatcctggtgaccaactcagaagtcacagagggatgagccagaagctgatttcatgacttccgtgggagaaaggcc

SEQ ID NO: 37630 - DNA, 201 bp, Bos taurus
actttgctccaataacctgacaaaaacccatcttttgtgcaatagtactctcaaagtcttatgtttcagaagcacttaattctgcctattctttcttcatmttcttccagagtaaataagtagggctccatccaccagggaaatggtttcagcactggtgtgtttgaaggacaactcataacacagccaccaagattctat

SEQ ID NO: 37631 - DNA, 201 bp, Bos taurus
cagtgtcctcttgcccctttccaaagagttggttgaatggtgagctgtgattcaggcctggccaattggcacaccccatccctggccaccatgatggattygtggagggacacacgggctcacagtggtgcatctgggatgcctcagaagatgtaggcctggagatgctggcagccactcgctaccacatggagcctgaga

SEQ ID NO: 37632 - DNA, 201 bp, Bos taurus
aaataagctggtcctttctcagctaggggcacggtgcctgtgaaaactgtgacaacctatgtgaactaggctgagataaactcaccaggccatagttcccyacagtcctcctgctctgaagcaggagggaggctaggaagagccaggtctggggttttccattagcccattacagaactcaggagcatggagttctaaggg

SEQ ID NO: 37633 - DNA, 201 bp, Bos taurus
cagcacagaagaccccagagcttcaaaattcagcccctcttgccttaaacaactgcattcttattccaaacaaccttggccacattaggcaggcatccccraacctgagtgggtcccagaacttcaggaccacctgctaatgcaaattcccaggccctgctcaccagagtgctcatttagtgacttggagtggtatcctgg

SEQ ID NO: 37634 - DNA, 201 bp, Bos taurus
tccatggggtcgcaaggagtcggacacgactgagcgactgaacaagtcagtacatgaagcataggcctgcctaagacacagcaaagggccccagggtgacrggcagcagaagccagagtgacagccacttgagctccttctccgggtggaggcaagagatgaagaaggaaggttctggccagcacggactgtgcggccatg

SEQ ID NO: 37635 - DNA, 201 bp, Bos taurus
gtggaaagggctctgaggggccgcaggcatgtgtgagtggatgaatgcacactcctggggcctctgtcacaagggccatcaggggataggccaacatcacygcccttggcttttacccccaccaagtaacccctgcccgcctgtggtcagctagagacacccagattacctttcagcaggggcagaggcctggagtagggg

SEQ ID NO: 37636 - DNA, 201 bp, Bos taurus
ggcctggcatgttgcagtccacggggtctcaaagagtcagacacgactgagtgactgaactgatgaagcactttcttagcacatatccaggtgtaatattktggggggcctgtgggtttgaaacttctttttaaattagcaagcaagattaaaacttctttttaatctcacttttcaagtgagatcttaaagggacccaat

SEQ ID NO: 37637 - DNA, 201 bp, Bos taurus
gggagaagaggcatgatctctcaagttatttcccctcaagtctcaacaacaagagtaccaacaatatgtactgagcatctacatgggccagacacaggatyactgctgggtcaacactgataaataagatgcatgaggtcttataagccccctggagctggccaccccagaagaaataagaatgcacatcatttcaaattg

SEQ ID NO: 37638 - DNA, 201 bp, Bos taurus
catggcagcagcaatggggttatgaggacatgacctaatcagagacagcttccttaaagaggaaacattcatgttgagactagaatgctgtgaggaaccayccaggtgcagggacattgggagggaggactaggtgatgcagactgtaaagatggcatgtgttggcacagctgggaaggagcttcaagggtttgctgaagt

SEQ ID NO: 37639 - DNA, 201 bp, Bos taurus
ctaaaatgtatcttctgtattcaatctccatcagccctctggaaaatcacagcaaatactaattggcaatatttacacaatccttgccatgatatacttayaagtatttgattaaattatacaaaccagcaacaatgagcagaatctgactatattacagaaagagttttccatctctcaaaagcaataaagtatttttct

SEQ ID NO: 37640 - DNA, 201 bp, Bos taurus
aacttatgcccttctggcccatctcttggctcaactctgttcaaagaatgcttacaaggattaatgagattacaaaaattgagtgttctgtaagaacagcyatagttatcactgagagacaaactgaaggaggagaaactgaagtaatggagactggctaagaggtaatttaggaggactattacataatccaagaaaaaa

SEQ ID NO: 37641 - DNA, 201 bp, Bos taurus
ccagcctccaaagggatatgtttgaattttcacctttcatcttagtaagatttcttacaatgttatttagccaatcattatttttaggtattccccactgycatcctccaaagagccaaagagcatgttatttatattgttaaatgaatatttatttatagacttaaagtggatgaattactatagttgtttcaactttct

SEQ ID NO: 37642 - DNA, 201 bp, Bos taurus
tatagtcgaagggatctctgttcttgggtcaggcctcaggaattacaaatacaggaaataaaaagggtactcggggctgaaaacttaatttaggactctaraaaatcctgggacaggaaaaaaggactttggcatttgtggttgaataaccaggtatggaatgtttgagtcatttaggcatccggattaattagattttat

SEQ ID NO: 37643 - DNA, 201 bp, Bos taurus
aatctataaaactggcactatgagtatgcgtttgtgtatattatctacttctctatatttcacctaaaaaacaaacacaactccataaaaaaggtacaaayaagtacataatcccaagggttagaataagatggcacaggctcatttacaaaaaagactacgcatttctcctcattaatttatcatttaatataaatgctg

SEQ ID NO: 37644 - DNA, 201 bp, Bos taurus
cacagatcggatagcttaaacaacagatattttttcaaaattctggaggctagaagtccaaaatcaaggtgtaggcaggcttggttttttccaaggcctcrctctttggcttgtagacagccatcttctccatctgtcttcacacggtcttcaccatcatgtctgtctgtgtactatctcctcttcttataggggcactag

SEQ ID NO: 37645 - DNA, 201 bp, Bos taurus
tgacaaacatttagtttttaatgcatgttctatgagtctgtgagggagactcttcaggctatagattggattcaggtcttttcatgttgtattttggattmactaatttcctggtacatattctccttacgataaatgacagaaattcaggaaaccaagtcaaaaaactcaagtacctttgaaatctcaggttttgtttat

SEQ ID NO: 37646 - DNA, 201 bp, Bos taurus
ttgacctgatcgtctctcccaccctctctgttctctcgcttctgtcactacatgtacttcattcattcgctctcttcctgtcatagtagcctctttgtccyttctcaaaggtagtcatgaatcctgcctcaggacctatcagtcaggagtcctcccatggggcttttgtttggtctctttactttgcccaaacaagctttc

SEQ ID NO: 37647 - DNA, 201 bp, Bos taurus
atcactggtggtctgggaggctgtgtatacatgcaaggctgcatacacactcaggaagattagagagggtcctagctattcacagatatatgctggacacraggccttgcacgtgtacagcggttttgcttcttctctgttctacgaagagaatgtgttccaggtggagtaaatggccgaaggctcatcttccctgtaggc

SEQ ID NO: 37648 - DNA, 201 bp, Bos taurus
aaactctttatacttttatttctgatgaccataataaatctaacagaaacaagctgtaaaatcaataaaaatgcacacttaccatattaatttaatgttayggatgaggttattttcctgaaactaaactgctggtcacagtttgcgtgtgatcctgacagttatagtacagattttctttgagtttggcatgcatatggg

SEQ ID NO: 37649 - DNA, 201 bp, Bos taurus
tttgaaagtaaaaaggtcagtttttattcagcactgtgctggttggttaagtattcctttgacctttcaaaatgcagttccccttttcctttctgttgacrccagaaagaaggatcaattcatattccagaggctctctctccttgcgggaccatatttgaataccacacagggttagaaaacaagaagtgaagagcaaaa

SEQ ID NO: 37650 - DNA, 201 bp, Bos taurus
ggtgtcagaaaggcaccttaccttggggttggtgattactttggtccctctgcgtgtcacttagtctttctcagtctgctcaacttactgaatggacatartaaacccagcccaaatgtgactgctgggtttctggcccgtgcatcttgttgagggtgaaccatggaagagcaagttggggtgtaggggatgggttgtgtc

SEQ ID NO: 37651 - DNA, 201 bp, Bos taurus
gagtttcagcatcatggttcttcaatcatttcccagcttttctgttatctgctgactcgtctggggagcgtggcactcccttggcccacggccacagttgytctgcaagtggagtgatctctaggcattttcttctctgtgcttaatgaaagacttgttgcggttttgctgtggctgaactagacttagctgcacacacat

SEQ ID NO: 37652 - DNA, 201 bp, Bos taurus
tttaggatgttgaccagggctgtagtcatctgaagactcgctggggctagaggactggattctaagatggttcacatatgtgatctggttgttgcagaagscctccctactgaagcatctgctgggctgcttgagtatcctcacaacatggtggctagcttcccccagaccaagctacccgagagaaagccaagtgggagg

SEQ ID NO: 37653 - DNA, 201 bp, Bos taurus
atctgtgaagtgggtttaatttttgcctagttgatttgtaaaaaggattaaatgatttagcttatggaaagccatgagcatagtatcccggccttggttaytgctcagaaaatgacagtcttattctttgacatcacaggctccatgttgcctggaccttcttgtcaaggagataagagaatccaggagtcagaggggcct

SEQ ID NO: 37654 - DNA, 201 bp, Bos taurus
acatacacatattgagacattagagcccattcgggctggtctgtgtaataaggtcacgttcaccactcttgcctgatacattttcgaggccagacagaggkaaggagctccagggcatgtggggagaggctgtaagtcacaggctttgtccagggaagaggccgagtcccctgtgatttgagaccatgggcatatggggag

SEQ ID NO: 37655 - DNA, 201 bp, Bos taurus
gtccaggaagatttcacatacctcggagcaactaagcccatgagccacaactcctgagcccacatgctgccactcctgcactctgtgcacctagggcctgygttccacaacaagaggagccacggcaatgagaagccacggcacgaccaccagagcgtagtccccactgccgtaactagagaaggcccgagcagcggtgaa

SEQ ID NO: 37656 - DNA, 201 bp, Bos taurus
gaaattcagctctcattttcttttttcccttttttcttttttttaaataacaatcaaattaccttgttaaatcaactcaaattaccaagttcttatctagrgcaaccagtatggagacagatgtggtgggagatcccaagtatttcaccatgaaatcatagggagatcaagtaacatggaatcataaaatactgattccaa

SEQ ID NO: 37657 - DNA, 201 bp, Bos taurus
tggtttgagtccatatactttacatacctttgcaggggaagctgccaattacttgaaagagttttatgtgctggagaaagaagggactttaccctccaaamtgccttccagaaaacacgatggaatttctctaaggagaagcacagctttcagattaaattcccagatacaagtgctaagcgaaattcacaataaccgtgt

SEQ ID NO: 37658 - DNA, 201 bp, Bos taurus
gtcacaactaagacccaatgaagccaaataaaaacataagtaaagctggtagaaactgaaggaagtgtcaaagaggaacagtttgtagcaagtccagagaktcggaggtacccccatggttatactgggcagcttcctgcatgacagctctgtagtgagggttctgtgtgtattacaacacatttgaccctatgatggctc

SEQ ID NO: 37659 - DNA, 201 bp, Bos taurus
actttcgtctgcatgtgattctgagttacagaacacacgtgaccaacatacattccttgggcatcgctgcctgagtgtggaatgggaggggcccgccttckatattatccttccatccaatgagaatgtgggtggcagacagcaagacaggtgtataccagaggagggaaagcctggacagggattcaggaggcctggtac

SEQ ID NO: 37660 - DNA, 201 bp, Bos taurus
aatgctttcagtgtggaaaactgtgtagaaaggttaataaacttggtgggaaggagagcacaagggaaggaaaagattatcccaaccattgagctgtatcrtgatttagtgagaagagcctacatgttggcatcaggcaattctgttcaccactgtgaccctggtcaccacactactgagccccacatgaaaacaggtact

SEQ ID NO: 37661 - DNA, 201 bp, Bos taurus
tccacaaataattgtttagtactatgtgaatacattattccaggtattgaagatataccaatgaacaaaacaatatcaaacaaagcccatgcctgtcaccrtagcacttaatgtctgtctagtgagactctaaaatatagaatgttagagaaaattctctaattttcagaagagatgctgatgggatgtttctgagctgga

SEQ ID NO: 37662 - DNA, 201 bp, Bos taurus
ctttagcccttcctgtaactattcaagaggaatccagcacatgatacctctaaagcactcaacaaacggctttttatctcccaggagaccctcatcaaggmggtcaggctcattagctctgttttaactgtggaagcaaagacaagtaaatacccagaccaaagtcaccccagcctgacacagaacagggactaagacaga

SEQ ID NO: 37663 - DNA, 201 bp, Bos taurus
accacaccactcaatcaccaccactagcatcaatgcaatccaatcaacacaactctacacaacacatgacaaaggtcccatcaatttagaaagtcatgacytatacacagttaaactgataatctctacaattcatttttactataagagccaaccatcaccatatgacaaggccctagatgaaggacactccgtacaatc

SEQ ID NO: 37664 - DNA, 201 bp, Bos taurus
atagggccaccagccatcctcataatcctgcagcggtggagggagttctggaaggacaccaggtaaaagcttgagatctgtgctcctaaaaaaggccaaaraccttgaagaggtgatacccaccctgcttgctcagcagggaaatagaaggatgagcccaggtgaactttaagtcaggagaaggacatttgtggagaaaca

SEQ ID NO: 37665 - DNA, 201 bp, Bos taurus
gaacagttcagagaaggcttatggtttaggtctgcaggactcagcaatttgacattctatttctgttgtttctcaccttaaactgaacagagtcagcaggrttttgtttgtttgtttgtttgtttgttttttccttccctgaactcatctccctattaggtttccttgcccattacttcccactctcatcgtttacttcat

SEQ ID NO: 37666 - DNA, 201 bp, Bos taurus
acatgaatggctggctataaagcagtactcgttttctttatggccatttgccttatgtaggccattaagactttaccactcaagcaaggaggcctaacttkatttttaaataagaacgtgttatgacttcaagacatttgtacactccagctggaaggcatctggcctttttgtgaaggacaaaggacttggtgtcctggc

SEQ ID NO: 37667 - DNA, 201 bp, Bos taurus
gaggaagaggcgggtacgacagcataccaagaaggaattaagagaggttgggaggatggagagtgatggaagagacagggaaatgctggctgggccaatgrttcaaggcaatgagatgacaataaaggtttggtttcatgatgatttgaaggtcccaggagatgagggccgagaagagaggagaacgtgaagtcgctcagt

SEQ ID NO: 37668 - DNA, 201 bp, Bos taurus
gtgtatatattttttgaattatttgttttcatttttttctgatagatatccagaagtaggattgctggatgatatggtagttctatttttaattttttgakgattaactatagtattctgcatgatgactgtaccagtttacattcccacaacagtgcacaagcatttgggacagactttccttgccactgttttgcacat

SEQ ID NO: 37669 - DNA, 201 bp, Bos taurus
ggagtgaaagaaagttatagccttactgacttgaggaagaaaatggggctggcaaagcagctggagggatagaataaaaatgatgtggagaatggggccayggagggtgggatttgcccctatgtctgaacatacattctgcccagtgcttagctgacaactgaaatccacattcatggggaaagctttagggggcctggt

SEQ ID NO: 37670 - DNA, 201 bp, Bos taurus
atacacatgcatatatacatgtgtgtatatatacacacgcatactttgaggcagcccaatcaactttgaaattgcttagaaaccaaatcacatttgagaamcacaatttataagccacaaagcattaagaaaatttctcagagaagaaatgagctttttgcttctttaccagtctccagggctctattcaattcagaaaac

SEQ ID NO: 37671 - DNA, 201 bp, Bos taurus
agtgaattgttcgctgtaattttcccctctaccttttcctaacatagtatttatctgaatgtaattgtaagaaaagatataatcatcttgactcaagccaygatacccctgaattcctggccttatatctcttttctgtaactttgctactgactacaaatactaatggctctaaagcaaacagatatggagatggtgttg

SEQ ID NO: 37672 - DNA, 201 bp, Bos taurus
ctggggctccacatatctcattattttaaacatgtctaaccagatggagactagaatctaatattttgcctttcccaacaaacatagctgatatccacagkagagcatgagtttacacagctgaatagccaagatccagtaaagaaagacaaaaacagacagcatacactatctgaagcagaatcttttgaacaagtagaa

SEQ ID NO: 37673 - DNA, 201 bp, Bos taurus
gccaagtgcctctaatgctctcctgggtattttatgattcatctcgctagaacctctttatcttctcgaaagtttgctgagctgtcaatcctcctttagckgacctcagataacatcatatcctgctctctgttcctgggaccctcttttgtgggtctgagtcctgtctagatgatgcaggctctgcccagaccaccacaa

SEQ ID NO: 37674 - DNA, 201 bp, Bos taurus
gctgaaggctggttcctcccactcacaggccctggaggctgcgctgggctcacctaccactgcctctgtcccttgctcctcctgctgaggatgcagagccrtcctggccctctgaatgtctcctccagctctcagggttggttcctcctctagatgtgatcttactcttctgacccctctcctgtttctcttaccaaaaca

SEQ ID NO: 37675 - DNA, 201 bp, Bos taurus
cctggccaagccattactagcagtactgggctctgacaccatctcattttcttggcttcctatcctggcttcttagttaaaagcatggaaattttctgaayttcttgggccctccatttcttcatctgaagcttgggttcctaactggctcattttttaggactatggatactgtgagtaagtaagtataaggaacttaac

SEQ ID NO: 37676 - DNA, 201 bp, Bos taurus
aaatctctgtgagaaaagagaaaacaaaactgattttctctgaattcccgtccatcctccactccccatctccaaccccatctgtctcctgcagctgcatygcaggcccaatcaataaagggctttcctttcacatggaagctttctgtgaagtttgatggaaaacactagtcagtaatccaaaggccaagcttcgccact

SEQ ID NO: 37677 - DNA, 201 bp, Bos taurus
acttgcttgccccatgctagctgctgctgagtatgcgaagataaatcagagacagttcctgctcttaaagttatatgttccatcatgcctagcatgtcacrggggcccaataagttttcattgagtattaccttagccttcagctctgtgtggcctctattctctgccttcccaggtactttcgtatattgttctgttgtt

SEQ ID NO: 37678 - DNA, 201 bp, Bos taurus
tcaactaccatctccactttgttggaggcccccaccctctgcaggggacgtgatcctgctagggaaacttaatagaggtagtcttgttgaggcttcagaartaggagagcaggcctttgactaacttctgaccctagctggactgtgtgtgagcctgcaagcacaccaattgttaccagcaagccaagcagcactttagat

SEQ ID NO: 37679 - DNA, 201 bp, Bos taurus
gatcctgttgttgtaggaagggcctcactctacacttaggctacatgaagtcatttcttcctaatattaatagcagcaggtcactgattcattcaacaaayatttgttgatcacttgctctgggccaggtgctattctgggtgctgagactgtagcggggaaacagaaatggagagactgtcaggcctcgtggaacttgcc

SEQ ID NO: 37680 - DNA, 201 bp, Bos taurus
gagcaacgttcctggtggtctggtgctaagacttcacgatcctaatgcggggaacctgggtttgatccgggtcagtgacctagatcgcacatgctccaacyagagattccacacaccgcaacgaagaccaaatatcctaagtgccacaactaagacccggcacagccaaataaataaacgattttttaaaaaaagaaaaac

SEQ ID NO: 37681 - DNA, 201 bp, Bos taurus
agtctttcttgatgtgcctctattaacatcctgttaaaatattttagagactaagttattgcatttccttggatactagtatgtctgttccttgccaggtkatcataggatgatctaagtaaaggagaatcaaaggataagagtttaaaggaaattcttagaatcagtgcctcccagtagttaatgtgtatacatttgata

SEQ ID NO: 37682 - DNA, 201 bp, Bos taurus
ttagaggaagctgtgtttctgatcatctatctgttcagaagagggagtgtacatatggagtgatgtacaccttagcatgcatgtagggtgatgtacacctyagtttgactgctgttggtatgtgtatctgcttggaagaggagacagcatatattaatgggattttttgtttgctcattttaaaatttgttaataagaaaa

SEQ ID NO: 37683 - DNA, 201 bp, Bos taurus
agcaacaagttaattgttaaatgggtaaaaggtatatgagttatctaagaactgagtcaagtgattatgtttcacacatactctcttgatactacaggctmtgtctctggtcaaatggattactaaagcgtttaatagccactcagagatcattttaaaggagtgcacctgtgcaaaatacttttttttttctctttaaca

SEQ ID NO: 37684 - DNA, 201 bp, Bos taurus
gtgtgtagtagacatcaataaaatgtttgaaataatagatctatcaccaaggtctgtacttgttcgtgttttcatagtgcttttcatctggctccgttttratgcctggcaaacttctgtttcttctttgaactctggctctaatgtcacctttatgaggacttacccaacttctccaagtgtttggttatgccttctctt

SEQ ID NO: 37685 - DNA, 201 bp, Bos taurus
tagttcttttgaattctgttctttcaagttggaaagcctcctggagtttcctgacctgcttcttgaagaatgggagggacttaatgaaaaaattaatgagrtgaagtctcagttggattcatcgttatacattattggcactgttccgcagtacatagatatggattctggcctgtaagttttcatagctatctgctgggg

SEQ ID NO: 37686 - DNA, 201 bp, Bos taurus
ccttgtgcccacttctggaattccaaataagcctgccacctatgagcaagcattctcccacaggaagcagaggagctgctctgaaattaggagcataactrttgtagtcttgtggcctagggcctgcttacttccaaaaccagggtgcttgctctctgagcctgaggctgtgtctggagttcatcaaaacttctactctgg

SEQ ID NO: 37687 - DNA, 201 bp, Bos taurus
gctgccctctgctgtcgggacctgcttgttgtgtgaccttaccctcttcaggtattcattccacagaacctgtcaccctcctcacttctaggccactaccrcacaagaccagcccgacaccctccagccaccccacctttcaccaggggagctggacgttcccagctggtctgcccagtggccccagagcctcagccctag

SEQ ID NO: 37688 - DNA, 201 bp, Bos taurus
tttggagtgggatgtcctcccctgagggctctctgcacagagaaaggagtagcagcccctgcacccaccctctcaaggggcctgtgtcccagatcctcccrgttccaccacctggacagtggagtttgaaaagggaatagcccagctcttcctgctgttggtgagaagaaactgagagacttcaggcttcagttgctttgc

SEQ ID NO: 37689 - DNA, 201 bp, Bos taurus
tctgcagcaactacagctaacatcatgtataatggtaaggaactggaaccttttgtactaacctcaggtacaaggcaaagatgactttgctcaccactttkaaatatcaggctggaagttctagctagtgcagtaagagaaaaggaaataaaaggtatagagattgagaaggaagaactaaaactgtctttattcacagat

SEQ ID NO: 37690 - DNA, 201 bp, Bos taurus
actgtcattttaattaacctatgtttaatagcttttccttccgaactttgcaaagccttctcggtaaacacattgcaaagcgtcccctgggaggcccagcytccctgtgtgtactgtactgtgcagacatgaaaaacaaacccgtttactgtgtatttgtaaatagcctggtcatcaggccattttcagccaatagtcaca

SEQ ID NO: 37691 - DNA, 201 bp, Bos taurus
agggaagcagtggtgggatgtctgggacaggagccccccggggccgcctgaatctgctcaggccgccacaacgagctgccacacactgggccttaaacaayagaaacgtgtcttctcacgttctggaagctggaagtccatgatgaaggcgttggcagggtgggttccacggaggcctctccttggttttgtagatggccg

SEQ ID NO: 37692 - DNA, 201 bp, Bos taurus
gaaagtaaataaaataccaacttatttaacatgtttctattgcttaatatattctcagtgtttcttaatatgtatcctttatatcaattattttgttttgrcatgtgaattctttggaggtcagggcatttttttcatctgtatacctgcttatcaactgtagtttatcattactaagtatgttaggtacatagaagtatt

SEQ ID NO: 37693 - DNA, 201 bp, Bos taurus
tttcatcaggactcaaggccttagtgatgtctcttttcttgcaggcctgattagaaaaaatgttagatgctgctcacatccatggtaatcaaggacactcmtagagtaacaccttggcccaatccctgtcctttaccaagtctcagtttttgaatttctgaaatgaattgagagagagaaagaaatatcatccttctatat

SEQ ID NO: 37694 - DNA, 201 bp, Bos taurus
cctctttaagcaaggcgtgtacagtccttataatggaaacaggtttcaggcacaataacccacatgctcacttatcccagaagcactaaagcagtttggcragttgtttaccatccaggtattcctgattcagcagttttcatacaattatgatttaatttccctatgctctaccctcccaaaaagtactaagaaatcgaa

SEQ ID NO: 37695 - DNA, 201 bp, Bos taurus
gttacctgccaaacctgggattcaaatccaggcaaaggctctgctcctcccactgcgtcctggggcctctcctgttgggaggccggttttccattgtgggrattgtcttttggtcatttaggggcttatcaggactgtggcaaggaaggggataagggataggggaccagggatgagaggacgcccaaggccccacagctc

SEQ ID NO: 37696 - DNA, 201 bp, Bos taurus
cgctacagggttggtgttttgggtccaccagaaaaggtgcattcttgtctcagtgcctagaccctcagggtgctcagcacacattaggatggattcacaayctcatcaggaaagccaaagacagaaggatacatataatatgattgtatttattggactggccaaaaagtttatttgagtatgtctataacatcttatgga

SEQ ID NO: 37697 - DNA, 201 bp, Bos taurus
aatgccagtgtggagctcatggcctcagacaccgccacctgctactccttccctgtgcatctgtctgcagactcctaggcccgcgccttcatcccaggaargttttagctcttgcttactgcctctctccccatcttttctcctgacagcagttcttggttagtagatgacccttcttgtacgctggcctcttggttcctt

SEQ ID NO: 37698 - DNA, 201 bp, Bos taurus
aaaatattcctagctctctttgttgggtagccaggataaacatttttaaagcagctctactctttatgcagtgatactagctgtctatatagagcatgtayatttgccaaactaacattccttaaccaggaaaattaaatgatttgggcaggaatctagagatttccaatccaacttcttaaagctctcaaatgctctcat

SEQ ID NO: 37699 - DNA, 201 bp, Bos taurus
ttgtctatagttattattctttctactgttactcctctttcacagtacactttaggagatcccctcatctcatggccctaaatgacaccccccttcacccygactgtgttaagtgctgccataaccataggagatctcctcgcacttatgtctcatagctgcatggaacttgcttactcctttgcatcaatgattgtcaaa

SEQ ID NO: 37700 - DNA, 201 bp, Bos taurus
cccactgaggagaagcgatgctaccagggaagctgtgggcacagcgagcttgcaagggaagaccagcatccgctgtggagtcgggcccagaaacaagggcrggaagagcgccgcacttaccgctctccaccttaaatttctcatgccgccccttcaggccgtcgatctcggactgctggtcagcaaggaacttctcaagtt

SEQ ID NO: 37701 - DNA, 201 bp, Bos taurus
tgcctgagattctaattaaattctatatgccctcatagggacctccctggtgctccagtggttaagaaagacttcatgcttccattgctggggtcatgagytcagtcactggtcagggaactaagactctgcttgctgcacagtacgtccaaaaaataaaataaacgtgtattaaaaacaattctacatgcccacacccaa

SEQ ID NO: 37702 - DNA, 201 bp, Bos taurus
ttgcttccatggccttgcatgatctgctcctccccgtacgtccaaactcaccatgagccacttttactcttgctcaccattcaccagccagtgttttctcrcagttcctcaaacggcctgcctggaactctaaattctaaattcatgcctcctcaccctctatagttgctcctttactgagatcaagttcccagttattct

SEQ ID NO: 37703 - DNA, 201 bp, Bos taurus
aaggtcagaaaggaatagatgaatattacgaatagggagaggatggtaaaatcattaggaatcaataatattctacgagagaggagacaaaagggaacagrttaggaaaagacaatcagaaggaaaaagttttcaaaagtagtacctgcataatagcaccttcataattattttccctgtcatatcagatcagatcagtcg

SEQ ID NO: 37704 - DNA, 201 bp, Bos taurus
gccagtagtctcacagcttttatgaaggagaaaatttttgaagtcgttactaattccagttgtattacccccaaagagtttatttaaaatgctttcacggytgtttggccatatagcattttacatctgaatatcagccagactcctaagcacagttggcatgcttcaccaattgtgaattattaatttaagtattaattt

SEQ ID NO: 37705 - DNA, 201 bp, Bos taurus
atctgcattaaaatataaaccgaagatgtcttatgatcagcgtatattgtgcccacagtccaactcaagtcattcataatgactttagtgtctcaacagaraaaaacaaaaatataccacccctcttctaaatatattagaagtcaaagcaacaactataaagtttgatgtgttgtttgaggattaaaggaaggaaggaaa

SEQ ID NO: 37706 - DNA, 201 bp, Bos taurus
tactgtttttgaccaaaagcaaatctttgcttgtagaaacatccccatcttcaaagatattatacattccccagaaagaagggttttgccaagttaaactrtaattaacaaataataaaaacagatgccttctctgaaatttttataaagctacacaacatattttcttttcatatttaagtaagaagtttgagtcaaaaa

SEQ ID NO: 37707 - DNA, 201 bp, Bos taurus
ctttaaaatgggttcccaaaatccaatatgcaggtctcagagaatatccaagagactagtgaaaggccactgaattatgggtataccaaataaatacgatrgcacctaacaaccaaagctgcaatgacatcacccccaggaaaatgctggctgtcaaattctacaccccactgcctcaagtctgctcatttccaagtccag

SEQ ID NO: 37708 - DNA, 201 bp, Bos taurus
ctagttcatgcaaactcagaggattcgacacgtataggcagtacttccatgaaatgcctgcctgatatggtccctccagggccacttaccttccctgctarcggctgttatgtttcttgtgggactcaccccgattgaaggtgctgtgtgtgtcctgggcctcagtaacataatcccgattccttggtctttcagttggtt

SEQ ID NO: 37709 - DNA, 201 bp, Bos taurus
cagcgttaaaggtcttatggccaaaggaaaggatcctgaagggttggtggtgggatgggggagagttgaattttaactcagccaaactggggactaatttycttggcagttcaaaagctcttaatgaaggctttctgccagacagaagcagcgtgggccactgggcaggcatgctgaggccatccttcagagaacaggctg

SEQ ID NO: 37710 - DNA, 201 bp, Bos taurus
tacaaagatgctaaaacaggatgtaactgcagcctgcggaggaaacacactggctgatctggaagtagagtgtcctgagagggcctgggaaggctaggtcyagaggtgagggggccaggtgtgcgctgagactggagagttaaggtgttgctcacctagaggaccaattaggaaagtactttccaggggggaggaaagaac

SEQ ID NO: 37711 - DNA, 201 bp, Bos taurus
tacggggttaaaaatggagagagtatgctgaaggcagtttctaaaaactcaaatagtggatacgttttttattgtcttttaatccctgaggtaaggctttktctgcttatggagggatctttctgcactcttgaggagctgattgttgagaaggcattgaagagatgccattccctgggcatgttgtcattttgatgaggt

SEQ ID NO: 37712 - DNA, 201 bp, Bos taurus
agacagctatggtgagaatttgccctgcaggcaaccctctccccctttctggagctgcttgtccccttgatggatagttcaggcctgtggtgtggatagcrccttctgcatggctcctgctgctgctttgaagacatttcactgtctgtggttccctaacccccagtcaggtactggggagagagggaggccaaagcagat

SEQ ID NO: 37713 - DNA, 201 bp, Bos taurus
ctgaagagaagaatacatcatggatactctcccatttagacactttaagaagcattcactgagcacccactgtgtaagaagcattcactgagcacccactrtggccagtcagtgggatagaaagaggggcaaaatgtgggtctggacctttgcataccatacattcacaatccttattgggtgttaccgggtcaaatactg

SEQ ID NO: 37714 - DNA, 201 bp, Bos taurus
agcaaaataatgacataatcaccatcagtgtcacagaccagactgtacacaaggtgacaggggaggggggggctgtaatacacacatgaggaggacccgcyggggcccactgcggctgcgccctgaggcccgggatgcgggcacgaccacgtgcccacctctctctagcggagtctcacttcctaaggtgaggcttgtccc

SEQ ID NO: 37715 - DNA, 201 bp, Bos taurus
ggtggtaaaacaagtagttacggggtagactctgaaaccagaccaccatctttaaatctagacactgccatcagcagcgtcacccgacctctctggccccytgttttctcacgtgtaaagtccaccccccccaccaccgccatcgagttgtgacaggggctattgcatgtgaagcagctggcccatggacagcccttactg

SEQ ID NO: 37716 - DNA, 201 bp, Bos taurus
gcctgtggcaggccttttcattgttgtacccacttgtttttccctgttcagtgcttgaggtgattttagtcaaacccggttctctatcgatatcctcaatkcatgtagcccgtgcagtctggaattgtgcttgtctgctcaaaccaagaaccaaatgtacacattcataccccttgcacatagtctccctcattattcatt

SEQ ID NO: 37717 - DNA, 201 bp, Bos taurus
gattttggtgaagaatctatggctgaggaccctaagaaaagtcagttactttcagtgtctctggctcttcaagacttaaggcttaagaaacctctaggaasacaccccagggttgctgaagattttggtaggcaagcagggaagagatttcatcatgagatttaagaggctcaggaaggtaactgcctagaaaccctttca

SEQ ID NO: 37718 - DNA, 201 bp, Bos taurus
gtccaaaggccaaatcaaatggatggagccaacgcgaggagttaaggtagcggaatctatatcccatgttttgagggattatttcctttagctattgaatsaggatctcgaagtcaggccttacttctgtgattaacaaaacctttgaggataatgaggggaatatggaaatggatttaagtttctcaaagaaaaagagct

SEQ ID NO: 37719 - DNA, 201 bp, Bos taurus
tctatcattcctatttcgatcatttttatcattcattatttctattattctaccattcagtcatagagggaaatggaacaggggcaaagtgtactgatcakccagaaatccagaggagggtgaaataattcccagatttgtagcatttgctgatgtctgtggtgtaagcattcccatcacagtggatttcaaggtactaac

SEQ ID NO: 37720 - DNA, 201 bp, Bos taurus
caagccgagtaacatgatatccagggcccagatatgagagagaacgggggtgggagggagactttaaattgtctagtatgtcctggattcttgctcccccmacccaccccagtaagccaccccttccatcagacactgcccactcaccctcactcactcacacctttgcacacccctccccttcccttcccaagtgccggc

SEQ ID NO: 37721 - DNA, 201 bp, Bos taurus
ggggtcccaagagtcgtccacgactgaatgactaagcacgtgcgtgcacacagtataaagtacttactatgtgcaggccccattctaagctctttgcctaygttgtctcattaattctcgttacaacctgatgagattggcaccattataattcctcctttacagttggagaaagtgaggccagagattgttgaataactt

SEQ ID NO: 37722 - DNA, 201 bp, Bos taurus
aggatggctgttgtcttgctctctggtcccctgctcgaccaatgccgtttcacctgcaccctattcatgtgacgggccttcttacatccttgacccaggcygcagctggtgattattctaactttaaatcagaactctcctctatgtttatcaaagggctagtgatgggcatgccttctgctggtttccctagtaactgat

SEQ ID NO: 37723 - DNA, 201 bp, Bos taurus
agtctgaacgtgagacaacagagccagtagccagagacccagacaggccctaaagccaacgcacttcccatcttcagtgggctcactgtacagtccaggaygcgctacacggcacctcgtggggccgctggcgacactctagcgccatcaaccttagtctacttcatctactccccgtttcttcttccatctttccttgac

SEQ ID NO: 37724 - DNA, 201 bp, Bos taurus
actggctcctcaactgtgctttggggcagtggtcccaaacctctttggcaccagggactggcttcatggaagacaattcttccattggccgggctggaagrgggacggtttggggacgattcacgcacattccattcactgtgcactttgtttctcgtattattacattaactccatctcagatcatcaggccttagatcc

SEQ ID NO: 37725 - DNA, 201 bp, Bos taurus
actactaagaaggaataaaagagaagtgtaaggcatatcctaggatggaggggaagaaccgaaggcagtcctagcaagggggcctgctccccaaggctggmttcggggctcccggagacagggcggctgcagcaggctggctgagagagtcagctgggctgccccagccacttgctccacagcaggagggccaaaggcact

SEQ ID NO: 37726 - DNA, 201 bp, Bos taurus
cttcttttaagcttatagattctctaaaaagttccacatttgtctttatgactttcatgacagtaagagtatcctctttattgatggggagaggaagatcraaggagtatgtgtgttgtgtatgagtgtttatacatatatatggtactgtgtttatgtatctatagatacatacgtgtgtgtgtatgtatttttttaagt

SEQ ID NO: 37727 - DNA, 201 bp, Bos taurus
tggtctgtcccctgatgagtgcatttaagattcaaaaaatgatctttgagatcagattttacattcattacatacagatgaggaaaatgctgcctggagayttacagggaagctagaaacagatccaccaggacacagacctgaagttcctgattcccagctaagttcttctggtaacacgctctccagggtaagattcca

SEQ ID NO: 37728 - DNA, 201 bp, Bos taurus
agccacaccctgcagcaggctctggccccagacacccccagcaatctcggcctgagcagtaccagaaccggggagcctttggagtgagtggcctgagaggragagaataccttagccacagcttggcatgcaggtatcagtcagagggaagaaagttgggctgtgagagaacttcctcagaattgagtcaattttcagaaa

SEQ ID NO: 37729 - DNA, 201 bp, Bos taurus
cactgaaaaaggacccgggagctagctggaggtgtgtgaaggtcagagtctgtctaggatgctgagcctacgctcctcgaggccagagatccccacactcyagctgcttccagagctggttctgttggatcctagagatcccaggaaaaatgcagacttggccattacctctgggcaggcaagagagaaatgtttttcaag

SEQ ID NO: 37730 - DNA, 201 bp, Bos taurus
ggcacgaaccggctatttttggtgctcagagattgtgtgtgaggaactctgacagagcacagtgggaaccacaggggccgtggtgtgaaccagctattctyagtgctcagagattgagtgtgaggaaccctgagagggcgcagtgggaaccacagggcctgtggtgagcctgactgccagcaggagctccggtcctctcca

SEQ ID NO: 37731 - DNA, 201 bp, Bos taurus
ggaaaacagctggcacctttccagctcagatccatgtggacaaagtgtaacataagcaggttggtataaacactgaaaagatcttggatgcccacagatayctgaatcactccactgtaagatggcatttcagagcaggaagaaaaattctctttcatacacatattacagggctttccactggtttttgttaaggccaca

SEQ ID NO: 37732 - DNA, 201 bp, Bos taurus
aaaaattagtagacaaacagagctgctgctatttccctcccctcccacatcagatcagatgctatagatatgccaagtcctctgccaatagccagcgccaytgattcctggcacctacttcctacttctttgctctctgagtctcttcttcgtgcagttttgcttccgagagtccacaagaaacagtgggtgggtgcaaag

SEQ ID NO: 37733 - DNA, 201 bp, Bos taurus
atgaaagcaaagccagacataaaagatcatgtctctatataattccacttataggaaacgttcagaataggcatatctacagagacagaatgcaggttacyggttgccagaagttgggggaagggaggaatggagtgactcctaaaggttatggggtttcttttgggagtgataaaaatgtctgggaatgagatgggatgg

SEQ ID NO: 37734 - DNA, 201 bp, Bos taurus
tgaagtgacacgggagcttgggaacaaagccaaagaatagcagttcagattttagcgtgggacttcaaagcatgttgaagtgaggactgtgacaggtcctrccctccatggcctaagggttctctaaggaaagaggagagactgggaccacggctcgtcaggctacagaacagacatgccaagaaggatccagaaaccctg

SEQ ID NO: 37735 - DNA, 201 bp, Bos taurus
atcattaataaacatcttttcttttttcttctcttccaaagaaatatgttgaagttatgacccaatggtattgatttgatatggagtaaaaacttcacacracagcacaacacttagaataagataaagcagtgttctacgttgaacagcacagagactcaaaatttccttgtaaaaagtattttaataatgacagtctac

SEQ ID NO: 37736 - DNA, 201 bp, Bos taurus
gactaaatagcaacaacaaaaattacgtttctctctcttcctgtgctgcttttatgacttctttccttttttctttgacttttaacagttttattatgatrtgtctggttatagttttctttgtagttgttttgcttgaagtttttagagctcttcaaatctgtgacttactgtctttcaccaattttggaaaattctcag

SEQ ID NO: 37737 - DNA, 201 bp, Bos taurus
tgggtagggcttgcatgtgacgtggtggccactggggagggatggagtggagcggaaggaggaagtgcaggtggagcacacagaaagtatgaaaagtggtrggagcctggtagttcatctccatgaatgcctgccacagaattagatcttcaggaggcagtggttcagaggagggttcaaggagaggctgaaggaccattc

SEQ ID NO: 37738 - DNA, 201 bp, Bos taurus
tacccaagcctgggatgggggtcgggtggcccatggtgttgagcaggggctacctgacctggcagcatcttgtcatccgctcccctgacaccacatctacratgatgctctggcagcccagagctgctgctcatcccgtgttcagtcacagacctgatgctcacagtcagcttggccctggagacttggctgtttctaatc

SEQ ID NO: 37739 - DNA, 201 bp, Bos taurus
tgaaaaaacagggatggagttgatttcttttgtttatggatgttaaatgctgctgcattttcttgcctctcaagagaagcccataaaatcaaaggccccayagagatcgggactcaagggacctccgtcattgtaaggagaagggcaagaaagagattttagtttttcccataggcctatttactcctggctattttagta

SEQ ID NO: 37740 - DNA, 201 bp, Bos taurus
ccatttctcagcctcccctcccagcgcgctgtccctgagccagtcttgccaaaacccaacgagagagcccgacccagagaaaaggcgtttaaccttggccrgggagctcagtggaaagtttttattacttgtcatggcaaaaaaaaaaaaaggagaagaaaaagaaaatcatgcttttgaaaataacctcttctttgaggc

SEQ ID NO: 37741 - DNA, 201 bp, Bos taurus
actggtggtttcctctcgggtgaagctctcgggatctgctgcagagcagtctcctggggtctgtggcaaggtttccagtgacgaaagttgggggtgtgtgmggtatccaaagaggccactgaggtccttagcagtggaggctactggagactgtgaaagagcaggacatggtggctcctgctgtgtgactgacacaggtga

SEQ ID NO: 37742 - DNA, 201 bp, Bos taurus
tccgtaagggctggtactcagtagcagctctgggccaacatcttccaaagaataccacttgggagtgcccaggatgccggttatcccttgtttgccttccrtggaccagttcggcccattcatgtctctctctttccagtcctactgtggagaagtaactcaaagcacagaccgtctttgtgatgggtcagttaaatcaac

SEQ ID NO: 37743 - DNA, 201 bp, Bos taurus
ttagcatctattgtttcatttaacatgtgcaaattctcttcagtgggtgtatctgctccattttagaggaatgggaactgaggttcgaggccatttgcctrtaagcagagaaacagcattcaaacctcagtttagttcagttcagtctctcagttgtgtctgactgtttgcaaccccatggactgcagcacgccaggcctc

SEQ ID NO: 37744 - DNA, 201 bp, Bos taurus
attccagcctcattggaccatctttgcctcatacttgctgaaggggaagagaaaaagattctcgtaaggtcagaagcaaaggaatggaaattgaaattcarattagtggatctcttctagaagcttggtctcagaagatgcaaagatccagataacataatcagactgtataattcaggttatcatcctctgcagtcctcc

SEQ ID NO: 37745 - DNA, 201 bp, Bos taurus
gaggctggtatgaggagacaaaatgtgtacatgattcctcacctcaagggcagctagaaaaaggcataggaatttattagatgaaggcccaggtgggaaayaccaagctgactctaccttccctggaaatcacatatcctgaagatgcagtctggttaggaagaaagaatattgggcttgaggcctgaatatctgagtttg

SEQ ID NO: 37746 - DNA, 201 bp, Bos taurus
tacttttgtgcattttctgcatagacaatcagcctgtctgtgagtaatgacaatttaccccttcctttctaattctgtaagtcctatttttcttttcatgyggaatcactaggaccattagtaatagcaatcgtctaagaataccacatctcaaaggaatgtgctctctaaaagttctccactaaatgatattttctcacc

SEQ ID NO: 37747 - DNA, 201 bp, Bos taurus
gttggaagatgaacacattcccctccctctgtgtgtgaggaggcaggagagacccaactatttaatatgttcacccaaaggacagtccaacaaatcatccyaaagtggccggcattagggaaacaagttcagcgtgcggttgctgatttttatgctatgatccatcttattaaaacagagacactaagattaacaaaccga

SEQ ID NO: 37748 - DNA, 201 bp, Bos taurus
caaaagacaaatcacaaaaaaaggaaagaaaaatctgaacagctggtaaatataggaagtcatacttgacctccttattgatgaaacaatgcaaaatgaarcaaaaaagctactttatgtctattatattataaatatttgaaaataacaataattattaaagcacctactatgtgttaggccccattctgatcaaaactc

SEQ ID NO: 37749 - DNA, 201 bp, Bos taurus
gcccctcgcacataatgattccttctccagagctaatcttcatggatggaggtttgacttctgcataaagttaaccctttcatagatacagtttccttaaracacacctgaatttgccagggcctcctagtttcaccgctgaatcatcagatgaaaacaaaaatgagaaaaaagcatcaaggtcattaattacagaagggg

SEQ ID NO: 37750 - DNA, 201 bp, Bos taurus
acctctgcactggccacgccggcttcattggtctcatgacaaccactgtggcgatggcgaaccatgtacagctgattccagttctggaaacctcactctcsatgggggccattctctgctccgccagctgatgcaactgcctccttacaggccaactttgtagccattacaagagtattagttatctatgcttatattcct

SEQ ID NO: 37751 - DNA, 201 bp, Bos taurus
gggtcactcatagcctggtgccggacggggggactggttggccttgcagccctaggctaaatgaagagtaaatggtggtgtcccatcacccccaaagaaaygatgcaattacaaggttggtggccctgctctcatagctgccctgaacacccacccctgtccccagagcaccagggaacattcaccccctccagcctctag

SEQ ID NO: 37752 - DNA, 201 bp, Bos taurus
tggaagaggggggccccagccacacgcttgcctctgggtccccgcaagagagagacaaatcctccaagaccagcctaaggctggactgaccttaaacctcrtggaggcacctgggcctgtgggccttttaagtccagtgacattaaacgagggtttgtcctgagctgatggggagagcctggtgggtgggtatgtccctgc

SEQ ID NO: 37753 - DNA, 201 bp, Bos taurus
tacagacagaggcagctctgggctcatgtgtgaggcccaggaggccagtattccaggcatctgtggagagaagggagggggaccctgagccccagtcatcycccaagactcaggctcctgtgtggccacatgtgaggacagtgggctagaaaggcgctgccccgggggtgtaccatgtctgacctctgcaacgaagtgaac

SEQ ID NO: 37754 - DNA, 201 bp, Bos taurus
ggcctccctaaccgtcagcccatgtttctcttcctgtgagaatgctgaactctggccccatcgggcgtacagggaaggcagagccctaagctgtcaggccrgctgtacctgttccccatggggctgacaagatttggctaagcctgtgaagagagactcctcccgcccacccctgccagccggtaacaactgccaggtgcc

SEQ ID NO: 37755 - DNA, 201 bp, Bos taurus
ccacctctcctttcaaggccccttcccctagaccttgcagggaggaaaggacggggcctctacatacctcagacggccctacgtccctgcccctcgccctygcgctggtcttagcgctttctgagtctcctccctctctgcgtcagtggcatcgctggctttttaccgttctgtaacagtaaatggacaaaacctgctcct

SEQ ID NO: 37756 - DNA, 201 bp, Bos taurus
agagcgaggctgacagacttctcagtgctcaaagcttccggaaggaaggagaaagaaagctggtggcagagcctcggcccttggcctggagccctgaagtrccggaccttgaaccctgcctgcctcgcggacgggcatgggggtctgtctaaggttgcaggggcccagcttccagggccagggagagagtgagagacctcc

SEQ ID NO: 37757 - DNA, 201 bp, Bos taurus
tcacagtcggaaatgactgactgattgaaaaacaacaacagctcccacacagctccgcgggtgggtgaggctggtgttggggccagtactggcccactggkgagtgaggctgcttctcagagtctctggttgcagggtgtctggtgcgttagggcttgttctggtgcacagacgtgtggggagtggacactctgatggaca

SEQ ID NO: 37758 - DNA, 201 bp, Bos taurus
gtctgagatccggttacaggcagggccacattccccgcaagatgtactggaagggaatccgtttccacgccttcttcagcttccagagcggcatgctgtgkcttgcggcccctcctgcgtcctccaagccagcaccctggcacacggcctcagcggtctcaccacctttctgctgttctcaggtctccctctgcatgcttc

SEQ ID NO: 37759 - DNA, 201 bp, Bos taurus
tctggaaaatgaaacacagtcttggatctggaaaatattctctaaatgtgatgctggaagtcacacaagctgcctttaaagagctttctaaatccaggcaytgtgctacagggtttaaatgggcctattttaactttgcttcacccagtgaggaaagcacaaacctttacatggaagtaagcatatgtaaagcttacatac

SEQ ID NO: 37760 - DNA, 201 bp, Bos taurus
tcccagcttaaagaatataaagaacataactgaggaacactcagatggaagagatgcacagggtgaggtgtgtagaaggcgaggaacttccaggcccctcrtagtagccactcttccagcacatccacatgttcaccaaccaggaatctctcagaatcccatcctttttttcttatggaggttttatggcaggggcaattg

SEQ ID NO: 37761 - DNA, 201 bp, Bos taurus
ctgcaaggtggtgcccggagccaagaacacagacaagaaaagcaagacaaaaaaggggttggaagaggaagaaaggaattaaaaaatatgaaaaataacartgatggccagtagttgaatacttgcgccaggcactcccagagtcttgtaatttaggttactgatgtagtcagcaccagaagtctatcagaagtgcaccat

SEQ ID NO: 37762 - DNA, 201 bp, Bos taurus
atcaagatcaacttattaattgaatttctccaggtagttacaatagctttttaaaaaaaatcataccatctttttcttgaaatatagtttatgtacaataktatgttgatttcagacgtactgcttaatgatttgacttttgcatacattatgaaatgaccaccacaataactctggtaaccatctgtcccccctcaaagt

SEQ ID NO: 37763 - DNA, 201 bp, Bos taurus
ggccttctctgatgttgagctgtcttgatgaccacaggtgtgccatgagcagtacctcatttaatcctaatatcagtaggaaggttactgacacttgacaratgcaaaaactaaggcccaaacggttaaatgatttactcagactcatcactggttttccttcaaaacactgtcttgggtttcagtgtcctaatttataaa

SEQ ID NO: 37764 - DNA, 201 bp, Bos taurus
acatctggggcgtgtttatgaggagggacaggaaggctcctgcaacgggcctctcacgctgctcccggaggcgcagtgcaaagggaagcaggaaatgacargcaaccataacttaaaccggccgtggcgcctgccctggttcacttcctaagtgaccactgcttaacaggccggcatctgagagaggacggtgtggtccta

SEQ ID NO: 37765 - DNA, 201 bp, Bos taurus
gccggtggaggacagcttgctgggaaggagcaacgtgcggcgagaggaccaccgctcggggtgttgcgtgagttgaaagaaggcctgggcataaagaattytaggcaatttaccaaggcagcaacagtcaagattgagttggagaacagtattacagttgagagagccaacctggggctagacttcctggtcacccatctt

SEQ ID NO: 37766 - DNA, 201 bp, Bos taurus
cagcaattttttggaatctgaattggaaccaattgattcttgaatgtacgggagaacctgcctgtctgatacagtaaatgctggttaaatttaattcttaygtgtgggtactgtgtgtgttcagtcatgtccgactctctgtgaccccacggactgcagtctgccaggctcctacatccatgggattttccaggcaagaat

SEQ ID NO: 37767 - DNA, 201 bp, Bos taurus
gatatttatttcctatagagtacaactgtgaaataagtacgtatggaagccacgtgagagagacaagagctggggcctgtgaaatcagagaaatctgacarcaaaggttgctcacagtgaactgagtcacagtataaaggaaactggaccctccctttgtggccacaagtctaagggcaacgctgtcaccgttaacagtga

SEQ ID NO: 37768 - DNA, 201 bp, Bos taurus
gaatgacatctacaacttactcataaatgggtcagcataacaatagagacatggagaatgtatgtgtgtgtgtgtgtgtgtgtgtacacattgagagagcraggtggggacagacagaagcagcttaacaactgtgaatcttgggcacgtgtagacaagagttcacagtactattcctgaaacttacctgcaaacctaatt

SEQ ID NO: 37769 - DNA, 201 bp, Bos taurus
aagagcactgtgttttctagggaaaaaaagaatacgagcaaacagaactcagtcaaatatagctgaaaaggtacagcagaaggtccttgaagtggtacacrgagattctaaactcctgaatgtttgactattttccacttccttattggtgcaaatgagaagatacaaatcaacaaggactgagaggtctcctggtcgtca

SEQ ID NO: 37770 - DNA, 201 bp, Bos taurus
cacaagttcaagacagattagtcagtctctcagctcatacatactttttctaagaaaaattatgaacactcattttataagtggcatgatttacattttgscattagctgaaaggcagttgtgttttcacctaaagctgctgtgaatatatttgtaagtgaatataatttgcatattaaatttgcatttttatgaccaggg

SEQ ID NO: 37771 - DNA, 201 bp, Bos taurus
ccactcagttcggagatgccctgaccgcgggctggaacctgcccgccagactccccagacgccggacagtgaactggccgcagcacgttcactgattctgmtggatgtttcttggcttggggaccgcagcgatgggcaggcgatccggctcgctctaggccggggcgagaacagtggttaaaaaagaattagctcgcctct

SEQ ID NO: 37772 - DNA, 201 bp, Bos taurus
atgggcaacacacgggacatacatgggccatacatgagccatacagggaacatacacgggacatacaggggacatacacgggacatacgggggacatacaygggacatacatggccccagcatgccagaaggggtgtatttctgcggggtgcatgttatgtgctgggacccaggatgaaggtccccaactgaccgtctctc

SEQ ID NO: 37773 - DNA, 201 bp, Bos taurus
tagaccttggaggacttgctgatgaatcacatgtggggtgtgagtgaaaggggggagtctaggatgatttccagatttgtggctggagaaacttcaaggayggaattgccattaactgaggtgggaagtgctgtgggagggctggtttggaggagaccaggaactggttccggacatgttaaatttgaaaggtctcttata

SEQ ID NO: 37774 - DNA, 201 bp, Bos taurus
cgtttttattccgtatcacagaccagtctgcctctaaaagcaatcattcaattcccaaatgtttaccatgtacatattgtcagcagaattataggaaatayaaatacggataagatccagttttgaaggaggttagattggtaaagaatccacctgcaatgcgggagacctggattcaatccctgggttgggaagatgctc

SEQ ID NO: 37775 - DNA, 201 bp, Bos taurus
tccattacacttattgtgtactttattttattattactacatcagctccgcctcagatgatcaggcatcaggtcctggagtttgggggcccctcatctagyacagtcaactagagattcgtgtagacacttgtccacataaatttggatcacagtggaggagtttggcctaatcaaatgaatttgggactccacgtattta

SEQ ID NO: 37776 - DNA, 201 bp, Bos taurus
ggaaaaggcttggtaatgtagactaaaaagaactctgaaatgagaagtgacatcagaatatttaaagcttgattgagttttgaatttagattggttgttcrtacttaacgtatttagggctagatgtttctcagctttgaaaggaaatccttgagaaatttagatgatttttaaaagaatgggaatacagtaagggttctc

SEQ ID NO: 37777 - DNA, 201 bp, Bos taurus
tcctccggtgaacagagcatggtgagcactgtgtgaacagggcctccattagctctctcagaaagcactctgcacgtcgcacggctacatttggcactggytcaccgtgtgcagtgatggccatgaggaggaagacagtacctgctacctctaagtggttcaggttgcgacaagttactcctttgtgtacggttccaaagt

SEQ ID NO: 37778 - DNA, 201 bp, Bos taurus
gaagagagaggagggctgacgccacgctctaagggctctaacgggtagctctggggtcaaagaggcagacgtgcacaagtgatggggaggaatggccagcraggtgagggaaaacaggaggtatcagttcatgggaggtccaaggaaaggagcctcttcaggaggaggctgggtttcctttgctgaaagctgctgagaagt

SEQ ID NO: 37779 - DNA, 201 bp, Bos taurus
tgtgcacttcacctgcagttgctccgcagatacctgaagagcagcaagtcaggaggtttgctctggcgctttaacgctggaccagtcccatgaccttggcmctgggattgttgaggcgtctcagagtcctccaactccaagggccggatctgggaagggcagagggaatgggttgacgaggctttctcttgggcactgtac

SEQ ID NO: 37780 - DNA, 201 bp, Bos taurus
accagagtgagaatacagaaagggcctgaggagataccggaaggcacaacagctggaaacgtccctaaccgaggaaacggaacagtcacccaagtccaggyggcccagagagtcaggtacagtattaaaccagagaggaatatcccatgacacattgtaatcaaaatgacaaaaacttagaatacagagagaatattatga

SEQ ID NO: 37781 - DNA, 201 bp, Bos taurus
aaaaatgcacacaagaaacgggaagagattaaaaatcttaaccttgttcattaggatagcagggaaatttattagcttcactgtcaacatatacatacatrtgtcacaagtaataaaatttaaggatgagcactttggtagattgattggatggcagactgactgatggcctctaacttttcacacctccctaaatgcata

SEQ ID NO: 37782 - DNA, 201 bp, Bos taurus
tccatattagcccaattctgactcatcccaacacactgcaaaatataacaacagacctatgaaattcaccatgaaatagccaatgtagttttcctaacatyatactctccctaacccaatatatatgtttataaaagacatagaaatcactgacaagatgtttaaatatagcccttcactgaggtctggattaggactatg

SEQ ID NO: 37783 - DNA, 201 bp, Bos taurus
ctgctctcctgcatggtaggtggattcttcaccactgagccaacaatgcaaggcctcatgtccactctattcttctaggtggtttgagaagcagaggaggktgagcagtgctaagtattgagggccgagagcaccagaagcccttatttgggttcatttttgttcatagcaggacacaggatgagccatggtggcagcggg

SEQ ID NO: 37784 - DNA, 201 bp, Bos taurus
tctactaaatacacctgggcttgagtcccaatttcatttaatggcattgtattcatttatccagccttctaagaaattactctgagtcattcttgacctcrcgtcctccaggcatcaatcctatgaatccgtacttctgaataaatatctccggaatgtatcttctgttcatccccactgactacatcactgagactgttt

SEQ ID NO: 37785 - DNA, 201 bp, Bos taurus
gttaaatgttattgcaaattttaaaatttgattacagttttgttttttaaggattcagctacaagcagatctgacgggagcttttctcagctgcagtggtrttcttcctggcaccacccctcagcggtgctaaccagcgcccgcatcccttctcacttccagataagggtcaggggtgagaaacagcagcgcggcacggga

SEQ ID NO: 37786 - DNA, 201 bp, Bos taurus
tgttaatcttactggaggtgcacaaattctatttattaggctgttaatctttgcctaacaggaccaggatcaatccctcaggttgctcataaaatccgcayggggaagacagtagactttgaaaactgtacacaaatgttgagagagggcagcgacgcacacggaatctgaaagaccaccatctcgtctgcagtatcaaag

SEQ ID NO: 37787 - DNA, 201 bp, Bos taurus
cagagaactgactatattggtcaagcaaaactgaaccactttcagcaagttttgaagggaaattcccaactgagcgttttcaggccaaagtctgtttgtcytgaatgatacgggcttctgtggcttgtgagggctgtattggactgctcacagaagggtcccacttcctacttctcggcctggagtctgagcagtaacacc

SEQ ID NO: 37788 - DNA, 201 bp, Bos taurus
ctggtacaatcagtcccattgagtgatgagtcatgtagggtgcttgttcttagtaaatccaaatacaaacagacccatggggctttctgctatgtgctcaygcacagtgctgaccagaaaactgattttacaagactatcagttcctaatggatatgtcataatgtcttggaagagcatattcaggaagtttacagcgact

SEQ ID NO: 37789 - DNA, 201 bp, Bos taurus
ttccatggacgaagtccatggggtcaaaaagagtcagacatgactgagcgactttcactttgactttccctccttttccggagtgtcccagtttatctttrgaagtcaggccctcagaaagtcgtgttctagcatcagattgtcagctctgacatcgctgacatcgctggcagctttaccggcagcttcactgactgaagc

SEQ ID NO: 37790 - DNA, 201 bp, Bos taurus
cttgttgctaataccagccacatctccgagagtggtctggagctgcccttgaacttgtcgtgggtcgggtccctgggccaccgccaggcacgggcaaggcrtatccagtgctttgtcacatgctggacacccacttaaggttggaagcgcctgtgagacaccacggtttctcaccccaggctccttggggccccgggagca

SEQ ID NO: 37791 - DNA, 201 bp, Bos taurus
ttagcatacacaccctcaattttcaggagagctgcatgttccctctggttccttggatccagcttataacaggcaaacttggcccacaccttccagacacrtttgtcgtggtaggggtcccgttcccggtggggggccctccagctggtccagcttcgagccacattgcccctttgccgaggcacacagctgagcctgcgt

SEQ ID NO: 37792 - DNA, 201 bp, Bos taurus
tcagcaagctctgggagttggtgatggacagggaggcctggtgcgctggagtccatggggtcgcaaggagtcggacacaactgagtgactgacaacatgckaaataaaatacagttggccttcatgtctgaaggtgttgctgctgagagtgctagttttatgctaaaatgtttgccgtcagcaaacagtcatggccagtga

SEQ ID NO: 37793 - DNA, 201 bp, Bos taurus
ttctttaaagagctcactaaagtaagtcattttttagtcagcagctctcaataggaaaaaaggttacatgattcctcatcctcaggatgccaaacagctcrtttaacttgagtctccccagtggtctgacagcccgactgcccgcttcagcagaatctagtccaatctgctggggaaatggtaaaattctctccaccagaa

SEQ ID NO: 37794 - DNA, 201 bp, Bos taurus
cagcctggagctgccccacctccttgccctctcggagctgtgtgagcatgatgatgaggggcgcctcttcctgccacaccatctcccagaagtccgacacygtgttgggcatggggccctgggtggcaatgtaggccttgtcctgcccgtcgtagccctgtaggcagggaggcaggcggtgagcacgggtctgtggcggcc

SEQ ID NO: 37795 - DNA, 201 bp, Bos taurus
tatgtattaagtttccagccatcttactgcatgctcctatttctattgttttccaggaattccaaaagcatatttatatactcacaggtggcaaaaacatyataaaattatttttgtggttgtccagccatggtaattcttttctgtctcatcaaagtgaatattgattagaaattattatgggggaaaaaaagacaacca

SEQ ID NO: 37796 - DNA, 201 bp, Bos taurus
cagtaacccagaccccagttttctaaatgggcaagcaaatgattttaaaagggaaacatacagtggttattatgaaatgttagtcgtccttttttgcctgycccctggcctctctctgtcctccctccctctttttctcatctctttgtataacgtatgtaaaattattaactgatcttagtataatcatttgggaagcaa

SEQ ID NO: 37797 - DNA, 201 bp, Bos taurus
ttgatctgatttctctttttaaaatttcaggtttatatattcatctgcctagtggacactttcactgtaagtgaaattcaacacatggtagagaatttgartgttggagtaagggagacataggttgccagctgtcccatttaattgtttagaaaccttgccgaagatatttaaactctatgtgactcagtgttcattctg

SEQ ID NO: 37798 - DNA, 201 bp, Bos taurus
ggggcctggaaactagtcctgccactagaattggtcatgaatttatgacattgaatgtaacaataagggaaggagggaggaacccagttgtctagaaagtrtttttggcctatttaggagccctttatcagcacattggcgcgcgggagcagtggggccatgctgcgggcctgggccatggctgccgccgatgctgaggtg

SEQ ID NO: 37799 - DNA, 201 bp, Bos taurus
gtgaggttctgtagccaagacctgcaggaagtcaccagagtctaagacaggttgtatgcttccctagaggagttggccttaggttgtggatcccttggcaragccaagttgcacaggttcccaggaaggtgtggacagtgatccacagcttggccacagctgtgacccctggggtggagaccacagtgaccccttgtcctc

SEQ ID NO: 37800 - DNA, 201 bp, Bos taurus
atggacagggaggcctggtctgctgcgattcatggggtcgcaaagaatcggacatgactgagcaacagaactgactgaaacaactgattctaagaagtcaytgactaacaagctgagcaaggccagaagtcctaagtccttgaggagcagtgtccaccatggggccctaggaatggggacttcaagggcaagtgacagaat

SEQ ID NO: 37801 - DNA, 201 bp, Bos taurus
ctccattccattccctctatttccttttggcaaagtggatgcctgaataaagaatacaataatttctagatctcattaggtgacaatacatggtttctgamcatacaagttagtggctcttcttgagatttctacagcaaataatgcctaaatatgagaacaaaccaaaagtgctgacagcaaatatatgccactgctgtg

SEQ ID NO: 37802 - DNA, 201 bp, Bos taurus
ttgaaaatttttgcatcaatgtttatcaaagatattggcctgtgattttccttattgtagtgcctttgtctgtttttggtatgagggtaatgatggccccrtacaatgaatttgggagtgtttcatcttcaatatttttgggacagtttgagaatatttcataacttgatagcagttggatgcatgcacttgggtgtttta

SEQ ID NO: 37803 - DNA, 201 bp, Bos taurus
tgtttgtttgttttttccagtacaggtattttattcacatgcagcctaagaataataatattagagactgtcattgagacattcatattcctactatggarttctttcctatcaccatacttgtaaaacctcagtaaatgacttcctagacagagacatcaattaatttcaaccattctttggaatgatcctaggtgctaa

SEQ ID NO: 37804 - DNA, 201 bp, Bos taurus
ttcttttgtctcttcactcttttctcctactccctaattatataaattgcttccttcatttcttaccttactcttctaaagatagaagtgagatcaagtgrtagtgtggaacagaatagataaacgtggtcatcactgagggagacccaagtttaagtcacttttttctttgaaaaatataaaattgtgttttcaatcgag

SEQ ID NO: 37805 - DNA, 201 bp, Bos taurus
gaaaaggcattttcttcttggttttcaaagattctcctgggtctgttgtttcttaaattaatcagcccaaaataatccttttgtcaaatgggcatattttkggggtactgtattatgctccctttgacaagtttgtgccataatttccttataaattcatctacagaaggacatcctgatatgtttaagtttttagccatt

SEQ ID NO: 37806 - DNA, 201 bp, Bos taurus
atccagttctgtacatcatcttatttattatctaccccagattcagggagctgcatttacagataatataagtcctagagaggaaatctgactttctgggrtatctaagaaaacagtccaagtgtggataaccccaaaatccatgttctgtgctattacttttttccccaaattatgctagggatactactggcagtgcat

SEQ ID NO: 37807 - DNA, 201 bp, Bos taurus
cagtgaaatacagcaagacacctggtgtagtcagcaggatcagtgagacatacggtctattgctcttcagtttctgtttcagtgaccattcaatgttgtartaaagtacatactctaagaatacaatggtttcttaaatattcagcgttaaatgaagttaatctgtgtgtagatttatgcctcagagaaggcaatggcacc

SEQ ID NO: 37808 - DNA, 201 bp, Bos taurus
gaaaaaaaaatgagctatcttttctttctctctgcccatactcaacatctagtgaaaacaggaatgagaaaagagctatatgatctaaatcgcagatattrgaaaaaatattgtttataaaaacattgcaagagaatattattttaaaaattggggtttggcaaagcaatttatagattcaatgcaatccctatcaagcta

SEQ ID NO: 37809 - DNA, 201 bp, Bos taurus
acaaagaatcggacatgactaagcaactaagcacagcacagcattccacttatcaggatggatatatgctacttttgaagacaagaagtgaccttttatcrtccctgaggtatataaattggttattgcctattgcagtaaaaattccaagaaaaataattaaacaaattatgtataaaccactaactacatctatatgga

SEQ ID NO: 37810 - DNA, 201 bp, Bos taurus
attgctaagtttacaacatacacagaagtaaaatgtatgaagagtacaaaaaaatagaagaggcgaaataaaagtatatgattgtaaaattcttatactayatgtaacatcacttgaaagtagattgctacagtaaagatgcatagaagaacattggagccaacaccaaaataacaactttatactgatataataaaattt

SEQ ID NO: 37811 - DNA, 201 bp, Bos taurus
tcagagccatgagtgcacccaccagatccgggtccgcgtgcaggcagccatcagcgtcagggggctttctctccactttcttctggcccacagttgctgtrgcgggacgagcccgatagccacctccgctgatgggagggggcacaggtctcaggctgggggcctcttccttcttcttgtcatagggccgatgaccgcggg

SEQ ID NO: 37812 - DNA, 201 bp, Bos taurus
gataatttaacacttatcttaaaatctaattagcagttaatcttataaacttatcatttgaggataggggtagggcaagtcagattggatgaaatttaacmcaagcatgatgacttgaaattgaatcagctttagtttatgtatagtgagcttgctcattctgtcttttttccttaatacaggtgatcagtgggcatcttg

SEQ ID NO: 37813 - DNA, 201 bp, Bos taurus
aattcaataaaggacactgtgaaatgggcaggagaccttgaattgtacatgatgaaagagaaagcctaaaaacgaatgggaaaatagatgtttcaagttcytgatttcccatttgtttctaaactaaaccactgtttacagtgaatgtgtcagtgaaagctgtggagaaactagctccttttcctttatttttagactcaa

SEQ ID NO: 37814 - DNA, 201 bp, Bos taurus
cttcctcccgttgcctccccactgttcatcttttcactgtgtgtgcttagttgctcagtagtgtctgactctctggctctttgcaaagctatggattgtasactgccaagcttctctgtccatggggattctccaggccagaatactagagtgggtagcctttcccttctccaggggatcttcccaagccaggggtcgaac

SEQ ID NO: 37815 - DNA, 201 bp, Bos taurus
gtaacaaactgtccagtgaaatgtgagaggaacctcacttaggggctgaggaagctaaaaaccagagtgtgtcttccactgtctcctcccctgtcagagtrgctttgggggcctcctcagaacacgtcctctgaaccaaagaagggctgctcctttctttcattgtctctgtcctctactgtcttattttggaatgtcttt

SEQ ID NO: 37816 - DNA, 201 bp, Bos taurus
agcagtttcagtggggccaggccagcagggtagagttctgagcctgaacgtgttcacatgaaagaccagattcattgccaggagacaaattctaagagccrgtggacagcacacataggtgctgcccccccccccccgcccccatcactgcaggtctcctccaactggtgtcatcttcagagcagcagcagcaaaagagga

SEQ ID NO: 37817 - DNA, 201 bp, Bos taurus
cgtttgagaaagataaggaatgtaacatttgttccttgatggtaataactcaaaacgctcccctcccttccttcataacactaattccatccatggggccrtgataagtcactggaggctctcaggaggttcatcacccacacgatttgatacaaaaacatctgtgctgatgcacacagctttgtatcattacagatgata

SEQ ID NO: 37818 - DNA, 201 bp, Bos taurus
aacatctataggactttccatcaagcaatagcagaatacatatttttctcaaattattctgtaagtggcccaaagatggctagtgtatattggcccttacrttatttactttttcacaagaggttggcaccatcaactcaatgccaaactcaaattcttacatatccaattactttaaatatatctaaagtaagtgtgtat

SEQ ID NO: 37819 - DNA, 201 bp, Bos taurus
cagggaccccagaccaaataaactcacatctcattaaggtcacaggaagggagtgtccccctccagcgctgactgcaagccttggccctccaccccacccrcccaagaccgcagtgtctcttccaggggggtaaacagatctaaaacgcatcccccttaagtggaagagccctgaggggatggccacagcctgccaggaac

SEQ ID NO: 37820 - DNA, 201 bp, Bos taurus
tgcgcaaccaacacaccgacaaccactctgtacccagacaacacctccggtttcactttcagtattcaataaactatataagatattcaacactttattayacaagtctttgtgacagatgattttgtccaactgtaggctaatgtttaaatgttctgagcccttataagataggcttggctacactatgatgcttggtgg

SEQ ID NO: 37821 - DNA, 201 bp, Bos taurus
cagtcccacagtttgctgggccctgggtccacccattagtaagctgctccagccttcagaccagcctcacccaccagagggggaacaccagccctgggacracggcagtcctgtggcctgctatgacaggccccagtcaacatgtcagcaccagacctgggcctgggggagggggctgtcttgcccaccagcaggtcaaca

SEQ ID NO: 37822 - DNA, 201 bp, Bos taurus
ctttgtgtttgaggccatagttgacttccagctccatgagcagcacactcttgcgcacgtttaaagtcttctggagttcatcaaaggtagaatggatgtcrtccacaatactggccttctggttggttaactgatggatgatttccgagatgaactgaagagctgaatctatttctgggagcctggaggacagttgtcaga

SEQ ID NO: 37823 - DNA, 201 bp, Bos taurus
cactgactgcggctcccgcatttacacatttacgagctgggagtctcgtcagggtgaaccaataaaatcgtccttgtggctccgttgggcccacggtcttycctggactgcttttcccatgaaatgtcagctctcatcagaaaacaaaggaagccagagtgtgagcgggaggggaactaagacaccatctggtggccattc

SEQ ID NO: 37824 - DNA, 201 bp, Bos taurus
tccaggctcagtccgccagcaggggcttccctcatctgtctgcaccctccttctgccggagcaagatacccttcctctctcccctgccacctccagcaggrtaagtgccccgcacctcgccactccgcctctcttcatcctctccctctcctgccagccaaatcagttgaaggggaccacaccaatggaaacaatcagctg

SEQ ID NO: 37825 - DNA, 201 bp, Bos taurus
ttacacctgctctttgcaatattctattctctccatgttatcattaaaaaaaaaaaaagactcagcaagttaagtaattcacctaagttttagacatccargaagcagataggatttggggaacttaggaatgtctattccaagactggcttctttcccctattctaacctgcctctattcataaggcaataagcatttta

SEQ ID NO: 37826 - DNA, 201 bp, Bos taurus
caacaaatattcatttgctaaaggtatgaatactggtggcaagttcttaaaacatttttaaaaagaatttaatgtttggaagagacattaaataggtctgratgctaaaactgagattattctttaaaaaacaagacagacttctacaagtaccctatattctatatttgcaaaatacaaaaatgaacaaaaatgataaac

SEQ ID NO: 37827 - DNA, 201 bp, Bos taurus
gatcaaggataatgccaacagtggggaagctgttgatagtatgtgctcctgacaggacgtgacgagcacgagccctggcctctgtcatcttcctcctaaamatggagtaactcagtctaatctcgagagtagcatcaggcaaacccaaactgaaggccattttacaaaatacctgaccagctctcataattgtcaaggcgc

SEQ ID NO: 37828 - DNA, 201 bp, Bos taurus
tttcagtggctgtgattccctgtgttgtacaatatgtctgtactgctgatctattttatacagtagtctgcctctcttagccccgtatctctaatctgtcyctccccacttcggtctcctcactgtaaccactagtttgttttctgtatctgtaaatctatttctgttcagattccacgtataagcgatatcatacagcac

SEQ ID NO: 37829 - DNA, 201 bp, Bos taurus
gaggtcgccctgaagctgaggactgaagaatgaacagaaggtacacaagcccagtagaggcgcagtgtcccaagcagaaggagcagcaagtgcaaggcctygaagcagaaaaggggttgcatatttagttagagaaaggacttcagtgaggctgacagcaggagaacaagtggataacataggaaaggggaagaggccagg

SEQ ID NO: 37830 - DNA, 201 bp, Bos taurus
agcctatagacagaggagctaattacctcatgggaaactagggatcaagcctggacatgacagacattacttcagtccatgttctgctggccagactaatyacgtggctccagcctaactgcaagggaggctgggaaacagttctttgtgaccaggaagaggaagaaggcacgtgggcctcttgcatctacttgaaaggtt

SEQ ID NO: 37831 - DNA, 201 bp, Bos taurus
gttctgcttctactcctgatcttgcctgagtcaagaacttcagaaaccttctggagatttgagtatggggaccatggcctggttggaatctgaagggacamggcacaaaccaggaaaaaattcctccaccatggtacatggggcagtggggcggccactggcctggcaactaaaccccagctggagcctgagacgctcttc

SEQ ID NO: 37832 - DNA, 201 bp, Bos taurus
ttcctcattttattcctcttttttccccagatggaggccttcatcctggattccggagatgcaccacgacgccaaatgcacagccgggagagagactgtaytccctgggccagcttccttacttctgccttctctctgttttgttctggtccttgactcattttccccagaagccccacagttatctgtctcggttctgct

SEQ ID NO: 37833 - DNA, 201 bp, Bos taurus
aatgtgaggagcagggccaggtattttaatcaaccgtgtaatcaataaacatacattgattgaacaaccatttattccaaaatattaattaggtatctccrtgagtcaggccccaggccaggcactgggaatatatcaatgagtaagacacagacctaatgtaaggggcacacagcatagttggaaaatcagaggaggaaa

SEQ ID NO: 37834 - DNA, 201 bp, Bos taurus
gactgaaactacccaacctggccaggcatcacagtaatcatgtgcctgagttactttacaacaggagggcccggtaaggaacatgaaattaacaagctacyatcaaccagaggcactcaggaaaggtcaaaaccagatgccacatgttctatccaacctcctagaattctcctcattggaatccgtcttggctgagcaatg

SEQ ID NO: 37835 - DNA, 201 bp, Bos taurus
atgttggcaggagaccattgccctgaaagcagcggccaccctggagacagacatgctctcctcctttgccagactcaggtgaaggcagaggatgcagaaaygagccctggccactcctcgctggagaatggaggccccaggagaaggggctttcccaggacttgacggtgtccaggggcagggtgcagcagtgcggagaag

SEQ ID NO: 37836 - DNA, 201 bp, Bos taurus
tatgaagagattgttttttcagctttattaaatatcttttgatatgtatggagacagtttaaatcttatttgacctgttgcattcccagcttaaatctttrttcctcattatgtgttattatttaattatgctcttggatttttcatactattattattttaggatatttagatgtaaagttcttttaatctttgttgttt

SEQ ID NO: 37837 - DNA, 201 bp, Bos taurus
atattggaaaacaacttctgaagaaaaaaagaaaacctttctgcttaccatggttatatctcagtaactgtgactctcaaacattttaaccctaatgggcrcatgtgtgagtgtgaaagtcagactgctgtcccctgcaccctggagagccaggggttgtgagtgtctccccacgaagcctcttgtgacaccatctgcccc

SEQ ID NO: 37838 - DNA, 201 bp, Bos taurus
gcatgttatgtttatcagaagatttccaactacaaaacttccttgctggctgggaagaagggaagctacatttgacaagaagaggcaaggggaaggcccakaactgcactgaacaaaataattccagggaatgccagcctctaaggggatgggtgcagttattttctacaagtgtcaagctgcttacttttgacccgcaga

SEQ ID NO: 37839 - DNA, 201 bp, Bos taurus
ctgactgggcacattctagtggcccttcaaactgcttggcatagttcagtgtagacaaagggcaaccagagttggggtctggtgaatatggagacctaaarcaggggcctctcttgtgcctctaagggaaacgatagtgtccttactgcttaattttgtgtttttctttctttaccagaacaaccctctgggatgtaattg

SEQ ID NO: 37840 - DNA, 201 bp, Bos taurus
cagtgttcttgcctggagaatcccatgggcggaggggcctggtgggctgcagtctatggggttgcagagagttggacacgactgagcaactaacagacatrcaaagccgcaaatttagtatcatttgtacttactgtatttttgtttaacccatgcttccaaaagataggggatgaagcagaatacacagaccaactacac

SEQ ID NO: 37841 - DNA, 201 bp, Bos taurus
caagctctaaacagacagtcaacgaaatgtgctggcaatcaaaaagaaaaattaagatattggaaaatgactcattcttggtgagtaaaaaagaaatcctrgataaactaaagaggacaaagaaaacagccgctgcccatcctaagagaggaacaagtccattacatattttacatggaaataagaaactactcatgatat

SEQ ID NO: 37842 - DNA, 201 bp, Bos taurus
caatagaaatcttcaatcactcactcttcctcacaaaataaaatttgctttaggctttcaatgagggccaattgaaaaattaatcataaaattgctagagyggtgacaaagctgctttgcaatgtttttaaatatttaattgactcttctttgcgatcagcatcaagtcctaaatgtgtggtcgaaaaaggaaaaatctaa

SEQ ID NO: 37843 - DNA, 201 bp, Bos taurus
gcaatgggaccacagggatcagagcaagagaagggaacaatatgggggcagtttggcgcaagatcagcatagcatcagaaaataataatagtaataataayagaacaaggatcctagtgaactgaattcatctggtttttaaaatgctttaactatggaagtacattagggaaaaaaaaagatgtatagtagatattacaa

SEQ ID NO: 37844 - DNA, 201 bp, Bos taurus
tttagacagaaaattgctatcctttggaaactatgtttcagaccaagttgtataagaaactttagtgtatgcgtattggggtgggaatatttaacctcagkgctcacctgcttcccaccagttctcgcatgctgtctggccatgtggtggaacattactgtcaatttccagcttgcacatttcctaagggaaattatggtg

SEQ ID NO: 37845 - DNA, 201 bp, Bos taurus
cacacactcctcctgaatgaactagtcttcctactgttagctgttcctaaaagtcctcctgttaggctcaccagccttccagtcagccaagggggcttgtytttcccattcaggaccccaggactgggatgcccataatgtctttcaaactgctcacacccccagcaagatctctccccatttaatctccctttttctctg

SEQ ID NO: 37846 - DNA, 201 bp, Bos taurus
catccagggacttgtcatcgcaggtgtgtaaaggccagggccctcaccccaactcaggataattctggagaccaatcccagcttcacaggctttccgaggkgttgacagaggccattattaagaccccatcttggccccccaccatgcccaaaccctccctctgcccagtcctgcatccttcccttccttcccaaaagatg

SEQ ID NO: 37847 - DNA, 201 bp, Bos taurus
tcagattttaactgccagcttgaacccataggtggaggccgtccatagtatctggtgtcaccattttacagacctggaaactgagactcagcctgtaaacrtgatccgtctaaggccacagagctgaggaggatgaagaaacaaacccttgagctagagaagacgaaaactgaatgtcctggagaagtaggcagatgggtc

SEQ ID NO: 37848 - DNA, 201 bp, Bos taurus
ggcccggttatccctccttcttgaactacttctatcatctccagaagacagctcatcttccagctttgatggagaagagctcacttgctcccatccagtcygtggttcagtcttatatgtgaaagaaaaatatcactgaaagtaaaaggacatttaagatttccttctcctaaaagtttctttttaacgagttagcttcat

SEQ ID NO: 37849 - DNA, 201 bp, Bos taurus
gcatatcaaagctcactgacagctgtcatcaccacaatcctttctaacttttaacaaaaacctggaatctcattagagtatttacaggccaacagcttttktttttaataaatcagattggttctgaccagtagcaaagacatggggagtgctctccagttcactgatgagcagctgatgacggctgtccccgggcacagt

SEQ ID NO: 37850 - DNA, 201 bp, Bos taurus
aatggaaaagccagtggggtgggagaaaaagcaagtaggtgtgaggttactgagccaagtagagcaagcgtatcacagaggggaaggtgaacggccacatsagacgctgccgccaggaaagaacaggaagacggagaactgacgctggaggcggcgctctgacaccacgatgaccctcacagaacacgcagcggagggtgg

SEQ ID NO: 37851 - DNA, 201 bp, Bos taurus
cacagggcaattaaaagcagaaacaccttaaaggcacaattctgaaaatgccatttttgcaaaacaaagcctaaagtgtcagaaaacacaatcggtctgarctagttgactgttcccctttccgtacctcctccctctgtctcaggtctctcctcaacctcttcactcagatgttctagaaaagctcaactctgattatgc

SEQ ID NO: 37852 - DNA, 201 bp, Bos taurus
tcaaccttcatagagctgaagagttagggctgtgctctgcattaggctttcgcttaaggggacgttgtggatggtttgattcactaaaactttctccatakcagcaacaaggctgttttgctttcttatcattcatgtattcactggagtagcacttttaatttccttataagaacttttcctttgtattcacaacttgga

SEQ ID NO: 37853 - DNA, 201 bp, Bos taurus
tttcttaggcaggattggagacagaaggtggtttagtaagaaaatgtggtctatatgttctaatgatgaatatattcacagagcagcttcattctgtaacrtgccaatgagttgccagaatattacatatctataatccaatgtaaattcaacatttaaaaataagtagaagtaatttttcatatctagttgagcaaatga

SEQ ID NO: 37854 - DNA, 201 bp, Bos taurus
ttctgttttgtaaaaagttcatttgtatttttttttttagatttcatatgtaagtaatatcatacagtgtttggctgtctgacttactgccgggagccagygtgaggaactccgcccatggcaaaggtcatgaggaaggaggctcggcatatgcaaagatgggatcgagcctcaggagtccccctggaaattctagagcac

SEQ ID NO: 37855 - DNA, 201 bp, Bos taurus
cagtacctgtccatggccaagatactggggacccctgccctagaggatgaagtccaagtgtcatatggtggcattctgggatgaagtctgcctttccagtrcttttcatcttcagtgcttctcttcatacacagtgatcttggccctctatgccagttgggtgctatcatccatatgtgctgtgaaagttgccacctctac

SEQ ID NO: 37856 - DNA, 201 bp, Bos taurus
gggaaagatgagctggctaacttactccattccaaaagcttttgtaacaaaagttgaaatgaatgaaaatgattgagtttgtaggcctggtctgcagataygaaaaactgctggagactgttgagtgtggaatggctttaatttacagcatggatttcggcccacgacacacctgcttttggttaacttttacagaagaga

SEQ ID NO: 37857 - DNA, 201 bp, Bos taurus
cctgcccaagatttacatgattgttttttttaacctgcctgctccttgccactctctccatcactcattccatctgtttgaacacatggctttggagcctragttaggaaacactcactctccctcctgtctgtctcacttcctcacacccctgccatactcacaacactcttgacaccagatgagggggtggtttgcaca

SEQ ID NO: 37858 - DNA, 201 bp, Bos taurus
acaaattggtccatagcagactcccaggagagctggaattcactgagacaaattcaggtttcctgtacttaaaagaagcattgcaacttccaggaagagcractcatttatcagagcttagtaatcaagtatgatagaggaatcattttggggaacagaaataaatatatccctcttttccctttttcctctgtgtgctgc

SEQ ID NO: 37859 - DNA, 201 bp, Bos taurus
ttacgtctcacgcttttcttctccacactctcggccagagggcagaagcaaaaatctgtgcttgcttctctcttctccatttcaaatatttttggtcatcrttttgacaagatggtggcctttgacttgtggacctgggaatgtggtttccttactctctttatggactagtcctgtaacagtaggtgccttgcattggcc

SEQ ID NO: 37860 - DNA, 201 bp, Bos taurus
ttatctgcccagaaaagcaaagcaccctttgagatgagcttggctattataaaccctggtgttttctactttcctagagaaaccccctccactaaatccargtcaaactttggcaacaatcactgcataataaactatcaaaatgtgttttaaaaaatccctcatcaaaataactccaatgtaaatgatttaaaacaacat

SEQ ID NO: 37861 - DNA, 201 bp, Bos taurus
aaattagcattgctgtctctaattggtctaacttgtatcatgtgatgtttctgaactaatcaccatccctggtctggttgatcagacttgggtcacatgtmtacccttagaataaatttcaccagaatcacaaaagattgaggatgagaaagagaaagaaatcagaggccatttccagaaaatattgtgattagatgtgga

SEQ ID NO: 37862 - DNA, 201 bp, Bos taurus
gctctgatgatgaaatgcctggatcctgtgttttatcatggtatctaagcagccatcaaagccacttcctccattaagggcccttttcaaactaatacaayattaagtcattttcaagatccatttaacttaagatgccctagattgcatcattatgtagtgttaaaccatcactaggccttgctaatttcccaagcaagt

SEQ ID NO: 37863 - DNA, 201 bp, Bos taurus
tagtgaaatggagaaaactgggtgtattaaatcataagtgtggcaagtgagcaagtggggtaagtcaggagggagcagaggagggccctagagcttgagcyagtcccatgggtcctggttggtaagttggttcttggaagtgatagactttcagattctctcctaggagtcaggctatcttttaaaaggcctcccttctta

SEQ ID NO: 37864 - DNA, 201 bp, Bos taurus
gtgtagagtttagctttacttgtaatcatgttttccattctcatagaaggttttcagggtcgaatgttcatgttaaaagttggggagtggggtagttgtcrgggtgcagtgagcacaaacttagctttggaaggccctagagtgaccccggaagatgttaacatgttttctggaagcttagagcagggtgaaaataactga

SEQ ID NO: 37865 - DNA, 201 bp, Bos taurus
cagaaattttggccaactcctccagcagtgctgagtctggctgacaagcccctgagaatgcagctcacagagctgccccgtatgcattctagtttgctaamgcccggccgaccagagctgactgcacggctgctctggggctgtcctcttgtgacctctcagggggatgatcagcttcacctctctggatgctcctggagc

SEQ ID NO: 37866 - DNA, 201 bp, Bos taurus
tctaattcccatctaaagaggcagcatccgtcaaaagagagtggagccagcagctgtgctgtgcttgagttccctgtggctaaatagatggtgtgctgctrcactgagctaccatcttcaacaccagtgactttctttgctgctttcttccagctggcaccttgggagcttggcccaaggtaagcaggagtgattctgaag

SEQ ID NO: 37867 - DNA, 201 bp, Bos taurus
ctcccagtcagtgttgagttggagaactgtggggaagaagtttaagggaaagaccccaagcatgagaatttggatggaaggcctgcaaaatgcccagagaygctacctttgccggcgtctctgtcaggtcacgtgcctgtccatccacaacctttgaaaacacggtgagtccaaattgtgacaaaacttgctgatgccagc

SEQ ID NO: 37868 - DNA, 201 bp, Bos taurus
cacgtaatcagcttgcccctccagctccctccctgatgcctctcgccaccccaggagcatcccccttccagactgccaaggcgttaatggacccttccaayacttctgacgtcaggttgtgcccaagcctggctcctttctactgagcaactgtatcccctctactcttaagaaaaatgctgagtcttcaccagctcatag

SEQ ID NO: 37869 - DNA, 201 bp, Bos taurus
gggttgggaagaggccatcaaaggtaggatggtcagagaaagttcccctaagaaggtacagttctgggtaaagggagcagttactacaaggccccgaggtragtgtgggcttggctctcggaaggggcagcaggaagagaggcggctggaggggcggcagggggagaacctacagagcctggaggagactcgctagggctg

SEQ ID NO: 37870 - DNA, 201 bp, Bos taurus
ttagctcagaggtttattttgaccaaggattgcttgcacggtctttaaaggtcacagaggtaaaccatgggagggtcactgggatgagacgggcaatgctrcacaggtttccctgaggcctgagtgccatacaatgaaaccgagttgagaacacagcactgttccgtcaaactgcctgattcagcaggtgctatgaactga

SEQ ID NO: 37871 - DNA, 201 bp, Bos taurus
tagagcctgtgctccacaacaagagaaaccaccacaatgagacgctcatgcactccaaaaaaatgagcctctgctagccgcaactagagaaggcccaccarcagggacaaagatccactgcaaccaaaaataacaaaataaataaatccataaaaataatattgagtctccatccaggctcagatatagatcagcaggcag

SEQ ID NO: 37872 - DNA, 201 bp, Bos taurus
aaaaagaaatcatgtttctcttccacttgaacaaccaaaaaaccgtacaaaatatatgagaccataattttttcaccagagatgatccttgagacccagamgataaaaaggtgggccttgtgcttgcctccatttactgatttgtgagaaattccaggttgtgggtcaggaagggcaaacctatgtggagcctggcaaact

SEQ ID NO: 37873 - DNA, 201 bp, Bos taurus
cctgctgggctcatcccctcccaagtactgaagcgatttaatttgtgcttgtcttcaggatgtaactgcgaagcaaccacacatgtggtgtctagtaattrttcagcaacctttgctcagtggggcaaaggtgatgtggcgtactgagaactgtgcttggaatctattttagccgagtgatagagcttgctgaaggctttt

SEQ ID NO: 37874 - DNA, 201 bp, Bos taurus
agcccatggcttttcactggctgagtccttgccaggaaaggagaggagtctttcttcttcgttttggttctgttatggtcacagggtgtcagaactcccaytctggtctcccaactctgtttaactgagatttctgtttattaattttttatgcttctaagaattgaagtctggttaagaggatgggagaattttggttaa

SEQ ID NO: 37875 - DNA, 201 bp, Bos taurus
gacccagggatcaaacctggatctcctgcattgcaggcagattctttactgcctgagctaccagggaaatccattcgtactataatcccttttaaagataygaaatatcttttaagatttatatcatgaaatatactagtgatatgaaaaattatatagtgcaagcacagtttcttgatttaaataatagaaacaattttg

SEQ ID NO: 37876 - DNA, 201 bp, Bos taurus
aaacatgattcccttaaatttttatttaattacctacaaaaataactttattcttttatgaagttgacaactaacattcctcacttagcatgttaaaatcygcccctcccttccctttaaactattattctattgggaacccttgaacatgaaaatgtacatcaaacatagcccatcacttattggacctcactttcctta

SEQ ID NO: 37877 - DNA, 201 bp, Bos taurus
cttgacttcacattccaagatgtctggctctaggtcagtgatcacaccatcatgattatctgacatgtatttgtaaattaaaccacattgagggattattsagaagggcttttgggccaactgttttgaaaggaagaagtctttttgcttaatcctatgacatgtgcaaagttatttttgtgaatttcacttattaaaatt

SEQ ID NO: 37878 - DNA, 201 bp, Bos taurus
gactaactggtacacatagcatcagcagacatctgtcaaactttggcttttctgttactcattctttcaaacaaaaacaaaacccagtctccagtctgagyattttgcagtgtttagttaatatgaaatatgtagtaaactgtaatatgaagctgttggatgaaaattctgatcaatgtagaaaacaaaggccatttattg

SEQ ID NO: 37879 - DNA, 201 bp, Bos taurus
ggctcctccgtccatgggattttccagacaagagtactggagtggggtgccattgccttctccttgttatatatgatactaattatgcaggccattcaaakctcagttcaatgatatttttcaggtgtaccaattaggagtagaactaggagcctggggaacttcccacgacattcaatattcaacattcaacacccagca

SEQ ID NO: 37880 - DNA, 201 bp, Bos taurus
actaaccttactagcacacactagagagattctccattggccttgaaaaaacaaactgccatgttgcaagtaagctacctgctgaaagatccatatggcargggacttttggaggcctctagaaagtaagagcagcctccaaccaataagcagtaagaagctgggactctcggtcctccagccagaagaaaatgaattctg

SEQ ID NO: 37881 - DNA, 201 bp, Bos taurus
gcaaggcccaggcatcccttgacacacacccagtaccctgacttcacgcaagttctgaagacccactccagatggaaggaccatccagctgtgcctaacamctgcaccatcatccttcatttaggccacaacgcaaattatccaatactcccatttctttagccagctgcacaatgccttcagtaggatatgagacgacca

SEQ ID NO: 37882 - DNA, 201 bp, Bos taurus
ttcacaaagggctgccgccaggcaatggttaattactccatttggatggagcaagggcatttcagtttttcctaactatctgacgctgcttgccaatcctrgtgaatgttttagtttgtaacctctgctctagagataggagacttaaaatcatacagcatcaacataggacataacaattattattctctaaaaaggaat

SEQ ID NO: 37883 - DNA, 201 bp, Bos taurus
ccacatgcaagcacctcaagggagacaaaaatggaacagccatttaaaaggaacatctggtagaccagtcactttctcaggcctcctggcctgcatttcargataagacaaagaggctgtggtcaggtggaaagtgctgtggcttttgtcaccaccctgacactgagaaggcctaggagggcctaaagtggaaagaagact

SEQ ID NO: 37884 - DNA, 201 bp, Bos taurus
ggccagagaaataggcttgggaatgggcaaggctgaaatcagccccagaggctaagaattgggaagcccagcaattgtggtttatcagagccaggctggtrgaagctggccactggtttggcactggagaccaactgtttactattttctctgcaccggatgcaaatatttcaccttgaatagcaaaacaaaaggcccttg

SEQ ID NO: 37885 - DNA, 201 bp, Bos taurus
ctgatagaacactgatgatatgtgaccctcatcctcaaggtgctcacgttcatggtacatgaatattaaaatacagttcaaagatgaggggcctttttttkgggaggaatggatataaaaatggaatgaatgtggagcattgtacatttccttcatcttagaaaggaaattaaaaggccttcatcttagaaaggccttaaa

SEQ ID NO: 37886 - DNA, 201 bp, Bos taurus
atggatgtggggccttgggcatggaagaaagggaaaggtttgtttaaagaacaaagggactgggcagcacaagatgcaagttagaaaatacaagaggaatsctttctattgaagaacatgtatgtgtcctgaggacccaggccatgctgaactactcacaaagacagaccagatagatggaagaagccacttctgaaccct

SEQ ID NO: 37887 - DNA, 201 bp, Bos taurus
ataaggccactagttttcctgattgcatttcaaaagggtggtccagaggtccctgaaaaagaccttcctgggctgtaaaactggccagaggctgggaggtktacacatcaaagaggcagagaaagaatgacaaggttctaaagtaaataaggaaaaagaggtccgggcctagcctcaggaagaaaacatctgaagtgtagt

SEQ ID NO: 37888 - DNA, 201 bp, Bos taurus
attttgatatgtactgtagtaatttcattctgattctaatgagtgtgagtgtgatttatatacacacacttgtttttattgcaattctcttcaatttgttraggtttgttttatgatctaggatataatcttagtgaatattccatatatactttgaaatacatacgtatattcggttgctgttgaattcattgtattata

SEQ ID NO: 37889 - DNA, 201 bp, Bos taurus
cccctttccttggaaaggaagctaagggtaagtaatcctctcctccctttcccctctgggccctccagcctgcttccagggccccccactgtgagaacccrgctaaaagttggaggacaaggagcccctagatgtgttccagagcttagcccccagggccaggtgggaaagggtggaagaagaaataggacctggcacatt

SEQ ID NO: 37890 - DNA, 201 bp, Bos taurus
gtggtcatcacgcctttttaataatgttagctgtgttgttgtgaataaagtccagtagtgtggagaaggctgtgtctgggacatggagacttacttcatcyccagttctgcccccctggttctccagtgcctgcccagcttccccattcttatcctagcccaatgaccgtctcccattcccacccatacctaccaaggggc

SEQ ID NO: 37891 - DNA, 201 bp, Bos taurus
actagtcaacccaagatgtgtggaaattggtcaaagccctctgtggctctcttgatgcccagggtttcctttcccgttgcattcatgagtagtccacttgytctggggagtggcccaaatggaagtgcagcctgaggccagctgtgaggattgctgggagcatttgtttgtgtgacaacccactccagtattcttgcctgg

SEQ ID NO: 37892 - DNA, 201 bp, Bos taurus
tgggtcattgtgaggctcaaacgagctctttcatgcagatttcacaggacacagtgaacacgtaaagtgttacctctcagtgactagcactactgtgaatrttacacctcaccatgagccagtcatcttgtccctcccaaacaggctcttccacccctcccacagagtagcctttaacattctcacagtctagctcagtgc

SEQ ID NO: 37893 - DNA, 201 bp, Bos taurus
ccctaagggaagggtgcttccccaaatttttcagagttatgtcataggaaaaataaggctccccagagcttggtaaagcatttaactaactttcttttgcmtcacataaacatgttaaaaataaaatagaaacatattagaagtgatttaaatattaaatgtacctaaagttccatataaaatcacttcactttttatgaa

SEQ ID NO: 37894 - DNA, 201 bp, Bos taurus
ttaatagttgatgaaacagttgacttaaaaaccatgctctctcaaagcacacatgtatatttatgtatatacatacacacgcatatattctttggttttcwtttcacatagactgaatgctttaaaattctttaaacctgcccctttcctcagatatgatgatatatttattgttgttgttcagttgctcagtcatgtccg

SEQ ID NO: 37895 - DNA, 201 bp, Bos taurus
agccctgttttcagttggtttcacagtagcctccattagaggaggcagggtccattcagaggcagggtcctgtgaagaaggaaagcaggccaactttggaraatttagtctaaagagaatgattgtgattcacagcatatggaactgaagcatatagacaagtcgtctatttctgagggaactgtacagcccaagaaatgt

SEQ ID NO: 37896 - DNA, 201 bp, Bos taurus
aggcttttccactgcacttcagggatgagcgggtctgcgggttattttccactcacccaggcacgtggtcattcattaaatctggaaataaatcatgcacrgggccccaggggagctgtatttgttttgcatggttctaattcagcacatccagcgagagaagacagccgctaaacccttaccagttccaaggaaataaat

SEQ ID NO: 37897 - DNA, 201 bp, Bos taurus
gttgctgtctgaagcatgtgttctccctcactgggcatttgcgtcttgcacaattgacgtggtaagataaaactttcacattttgagtgaggggtgttctmattgcctctgtatagctgtctgtatacaactcacagatgatgtccattaagttgatcctggatatttgggttcatgttaaaacatcgactggaaaagaat

SEQ ID NO: 37898 - DNA, 201 bp, Bos taurus
tatcttgaatcctattttgctatggaggcctcagaataaggatttcagcctgaaggcagccccacaaactgaatccccatggacgcagcctcaagaaagckatgaaaggcccatgctttgggcatcgatctatgggctacctggtttctacaggtagatgtcaaaaactggagactctgagatttcaccttattcgcaagt

SEQ ID NO: 37899 - DNA, 201 bp, Bos taurus
tgaagctttgttccagaatttgtctggttgggcccatgtgtttcagtaccaaccactgcaatacagttataatagaagcagttcttgaaggtggttaacamatatctaactttttggcccatccctggaatgtccaacacctttgggtactgagctgcatgtagaatttcactgtgtctaggattagggatagtctgtcag

SEQ ID NO: 37900 - DNA, 201 bp, Bos taurus
gtggtcactctggaccacctaatgaagaaactcaaacctaggttagaaaatttggactctgatgaactaaagagtccctgagaaatcttttacatcttctrtttcctcaaccagaaaattatttccaacagctgcactctggaggcatagtatgtaaattaactagtgggtttgctcattattttacaccctatagcccca

SEQ ID NO: 37901 - DNA, 201 bp, Bos taurus
tcctgtgggactggccagaactgaggcagagggatggagcatgccgcctgcgcctggggacagtgcttattgatgcacctacctgggggtctacactctcraggatggatgaggccatatcaacgccaagctgattttcttggtccctacagcagcagagaaagtatcctgctgctgctgctaagtcacttcagccgtgtc

SEQ ID NO: 37902 - DNA, 201 bp, Bos taurus
agcagggctgtcagtgagcaggcgggagttcaaggccgcctgccgccttcgcgcggagaatttcattaggcgccgaagcaatgttccgatatccgcgggaytcaggtgcccaaggcccgcgtccagaagatcacaggggggccgcctggtggcattgaacccaggagctggtactagatggcctctctcatgagagtatat

SEQ ID NO: 37903 - DNA, 201 bp, Bos taurus
gttgtaaataatgctgcaatgacccctgaggtgcatgtgtctttttttttttttttttgcgtgtgtctttttgaattatgtttttctctgtatatggcccrtatctcccaccgtcactttaactgtacaactcttatcaggcttcacacagccttctttgccatcagacatgtgctacaaatgtgatcttagaagggagga

SEQ ID NO: 37904 - DNA, 201 bp, Bos taurus
cttctgcattgggagcatggagtcttagccactggaccaccagggaagtccctgaaaccaattttgaaacacaaacttgaggagccatttctccaccagckaagaatctcatagacacaaaactcaaaaacactaaaggcaaagtctaagagactggcatgtgaggaacagtagctgctttgtagcctaaacacagaagtc

SEQ ID NO: 37905 - DNA, 201 bp, Bos taurus
agaggctccgggcatccttctcttccagccgcggcccgggtgaaggtcgcatgcagacgagctcgagagggcgcgaacgaagctgcggatgctgtgaagckgaggcgctgtctgccgcgggccggctggagctggagggtaaccggcgagcgcagcgcgctgacaaagcgggcgctaccaagcgaacccagtgagggggtg

SEQ ID NO: 37906 - DNA, 201 bp, Bos taurus
acagcatgatattttcacacttccttctcctacccgactctcttataggagaattctagatttttaaaagtctcttaaagcatctgggctgaaatgacaaygcattagctaacagaccagtagaaatttgagtggatcttctaattattcttctgctttttacctttcacactttctctctccctgcatcttcctatccct

SEQ ID NO: 37907 - DNA, 201 bp, Bos taurus
gaagtcctaaccaggatctcaccgtgtgactgtatttggagatagagcttttaaagaagtaattaaggttaaatgagatcatacggatgggccctaactgrtatccttataagaagcagaaattaggatgcacacatacacacacgcacacacacacacacacacacacacacacacacacagggaggcccatgtgaagac

SEQ ID NO: 37908 - DNA, 201 bp, Bos taurus
aagagtcattcttctcttattcttgacttaaatggaaatgctgttacaatttttctagtaagtgtggtggtgtttgtgtagattcttaaaatttacaatarggataatatctttttattttgtataattgttacaagggtcaaatgctctaatagattaaaatgttatgtaaatgttaaaagctatgccacagttacctgg

SEQ ID NO: 37909 - DNA, 201 bp, Bos taurus
caggaatgaccttatctttggtggatcagtgctctgcatgtcctgtctactggatcttgtcattcagataaatgagcttccttttgttgcggaagggggaycacttccagggcccgaaactgggctcttgtctaacacttggaaatgaattgtccaaggagacacatttgctgacaaagcaaaagattttattgggaaagg

SEQ ID NO: 37910 - DNA, 201 bp, Bos taurus
cttaagattagaaaacaatgctgggcccatttgaggtattccaggaagtgcggcactgtgtggctcctagacttttaggactatcttggattccttggtcrggaagaaggggaaagaactcataaatagctcatggggtttccagtggttatcttgggccaggaattgctcccgtggagtaagtcttggtggagtttagaa

SEQ ID NO: 37911 - DNA, 201 bp, Bos taurus
atgacgtcattttctcttcttttccaatattgtacagtcaaggtcattcattcaacaatagatcgcaaagcatgtaataatatttctaaagggctaaattrtttcaattttcatgtaacctctgtgtaaaaatagttctctacccatttaccttcttccattcacacattggcattgttgtggcccagtttattagactaa

SEQ ID NO: 37912 - DNA, 201 bp, Bos taurus
gttccccaggtaaatcccatgaggcaataccttagagggtttcctgggaagctttcttcatgctggagaagctgggtatctgccttgggccctcctttttkccctggagaaattacaggtcaagttggtggggaaggggaacctcctggtgtggcagcatactggcctggggtaggagagatttggccaaaaggaagcaag

SEQ ID NO: 37913 - DNA, 201 bp, Bos taurus
gctaacatttcaattaatgtcccttttgtctcactgagaaaaatcatttcacaatttattacactggattaaagagtgtatacattctggaggtagaacaygactaaaaggcaatctggcagaaaggatgtcgaaacagttggtatgtttaaattgttctgaattccttaaataaacgtttggggctgctttcccaagaga

SEQ ID NO: 37914 - DNA, 201 bp, Bos taurus
cttccactaaagtttttccattttaatatattgcccttgtaatttcagaaaagagtaaaatttttgcctgggttagagatattctcaattgatttataagyataaatttgggctgaattattcagataagccggcttctgctaagaatatctacatagatattaagttatttcctatgcataaaaagcaccttcaataaaa

SEQ ID NO: 37915 - DNA, 201 bp, Bos taurus
tggttctgatcactgtatggtgaaagaatcaggtttttttcagtatacaaaaaataagtgaaaagcactaaaaattctgtggcctcaccacactttaagayattgtaataacattcattctgtttcaacccttgaaatacaaatttcccacaccacaaagttttctccaggaaagagaagattggcccatggatctgaact

SEQ ID NO: 37916 - DNA, 201 bp, Bos taurus
tatccataatacttcagttctggcctcagtcaaaactatttcactcataatgcccttaagaggaatatttgtaagagagagacagaataagatgttgttcwctagagtgttttctgaaatcctaatgaaagacttgaaaaagcaagattgggcagtacaaagtttgtaaccaagtatcaaagttaatcacactcttctgcc

SEQ ID NO: 37917 - DNA, 201 bp, Bos taurus
gaagattaaattctagttctattatgctatgcttttttctcatactggagactgcccattattaaatactaggatgtgtgataaaattctggcctagtatraattttcaaccaaagaaaagaaaaccatttcaggaaactgtcaatataagatagtgaaatgtaatgacataatttaagtcaatattataatattttgaag

SEQ ID NO: 37918 - DNA, 201 bp, Bos taurus
tccaattttaatagtcatacggtctcctggggatctttttaataatggagattttgattttaatgtgcttccagatgatgttgacactgctaatatgtggmacacacttaaaatactattagaaaggacacaaactatggtctgtattgcctcagatattaatcctatgatatttcttttctgtttcattactgattttaa

SEQ ID NO: 37919 - DNA, 201 bp, Bos taurus
ccgttctacttgaagaaatgaactctggaaaatagcaatatgtaaaaaagattacagtttacaattttgaaaaagtgaagaggttaaatgtctgaaaataratgattgattttaaaacacatcagtacaattataccagtagttcccaagactctttttcattagaatctattgaggagcttgataaaactacagattttc

SEQ ID NO: 37920 - DNA, 201 bp, Bos taurus
gtgggtggacagcggcctgatatgaactcagcggaactgactacaagagtcctgggagctgcatcatgctggcgtattccataaatccattacccctaccrtagtttatcttaggccaaactacagggagggaacacaaccccacccatcagcagaaaattgcgttaaagatttactgagcatagccctgcacaccagagc

SEQ ID NO: 37921 - DNA, 201 bp, Bos taurus
gtacttgaatctctaattctgaatgagttatctgagggttgctggtaaataaaggaaaattcttgtcaatctttacttaatttgatgcacttacttatttrtatctctggagagaaactctctcaaaacagtggaccaataacatctataattaaaatactacacttaaagttttgctttcatttaagtcagacagattta

SEQ ID NO: 37922 - DNA, 201 bp, Bos taurus
ttttacagaagcattggaaacatcgaggggaaaaataatccatatccaagaggtttatttttctgaggactagtctctggcctctccatattgaaaagaaycacctatgatcatcctgccaccgggtgactggctggtttccttggacatagagccctgttagtgagtcggtgttggcctttgctgttgactggtggatgc

SEQ ID NO: 37923 - DNA, 201 bp, Bos taurus
ctttactactaataagagtctgagtctctgggtctgttggtcaagtagactcaattatggaataaaaacactgaatcacccagacaatggtgtcataataygcctcttattgtttagttaataatgctaaatggtttctttagttatccaaggatagttcctcattgtttaatatcttttatgttataaagcaacagtaca

SEQ ID NO: 37924 - DNA, 201 bp, Bos taurus
tggaatatcaattttgctagtctttaaaaattctgaaaaaaaagatcacagagttttagctgagtagttaaaataaactaattgattctttaaacaaaaaytgatttaccgcctatcacctttcaaagaaatggaagcctggggagagagcaatggacaaaggagacagaaattcctatctactttaaagatgaagagatt

SEQ ID NO: 37925 - DNA, 201 bp, Bos taurus
aattcagtgtgttccctccccttaaagcagacccactgaagtgtttaaaaaagagatcctactctcacaaattaaatcctcatctttctagggaagagagmttgatggtcaaatatttttcagtaacttcttgaaaaatttgtttaaaaatggccttcatattgagagattattgatgatttattaaaagttcacatgctt

SEQ ID NO: 37926 - DNA, 201 bp, Bos taurus
aacatgaaagcatattttccttatggatcagagtgtttatgtgaaaggactgatttcaaaatttggatagcattttctcaaaaatttacctctgagttacktttgtctccagtcaaaacctgtttttcttttttttttcccctgacacatagtaagcaacatttaaaatgtggatagatagatagagcagataggtaaata

SEQ ID NO: 37927 - DNA, 201 bp, Bos taurus
cgggatattcaaagtagtttcaatatggcctaaaatatctgcttacatgggttaccttgaaaacaactggattgtaaaaatctgagtttggcactggaagrctcccaagaaaatgggccccagccaactacaaagtaaacacagtggcagtatacagggatcaccactgactcatttatgtaacaggtggatcatgtttcc

SEQ ID NO: 37928 - DNA, 201 bp, Bos taurus
cactttcaaagcaagacaacaagtttctgtgcaatgaaaagaaagaagaaaatttaaattgtactctctttctgaaaccccacagaacctgattgcagcakagaaagttttctgcattactttttttaaatgagtttccactggcctgagatgactagggaacagtctccaatatgcctattcaaggttagaatttcaaaa

SEQ ID NO: 37929 - DNA, 201 bp, Bos taurus
aacatgaagtaggaaaatatgaattttagaatgccttctagttttatataaacttttattcaaatagagattaatctcactattcaggagtaatgatcacrttgacactgtgaccaaactaaaagggcactcagaggtagataacattttcctttctaaatgtcttttcttcatgattacatcagaaacttcacatttcat

SEQ ID NO: 37930 - DNA, 201 bp, Bos taurus
aagctgccttgctctgagatgcttgctttgtttagtgtttacactggaagtggtgttctaaaaggcagagttcccaataagggagtggcctgctacaaaayacatgattacttttcagatgctgagaaatccaactttagcctcctagcatgcacagggaagatttgtttgggccgtttttgtttaagctaggtgtaccag

SEQ ID NO: 37931 - DNA, 201 bp, Bos taurus
atctggtccatctgctggacagccagtaatatccagattttctgaatacttctattgatggatacttgacctattttttttttttttaattttggcctttyaaaaatatctctacttgcacatcaaaatacaaaacccaatatttctttctataaaaggtagacaacttagaaaatatttatttatttaattggccatgcc

SEQ ID NO: 37932 - DNA, 201 bp, Bos taurus
acttggatagccagcttgacagttttgatgggccattattgtagcttaaatttcatttttggaagatttcatttgacatttcagacttattatgctacctkgaaagctggagttccatagggctctgcctttgatctcaggtcatcatcaattaatgccaatgatccacagcatccccctcatataaacgtgaactcaaaa

SEQ ID NO: 37933 - DNA, 201 bp, Bos taurus
ggagatggtgaaggacagggaagcctggcattcttttcagtccatgggattgcaaagagctggacatgactgaaaaacaacaaggaggataagagcattaraagcagtcatgaagtggtctggagagttatcctcaaggaggactactcacctcaggcaagtgtattgctcctttgaggagaggaaggagaaatatttatc

SEQ ID NO: 37934 - DNA, 201 bp, Bos taurus
tgaccagaagcagccagaaagtgactgaatgattaaagagtagtatggccataacttgatcattacagggaaagcgtgaaggtggaatttggagaagaagktatagaacagcttctgcatggcccattaaagaagtatgggttttatgtaaagagtattgaagtatctttttaggatttataaaaagagcaaaatattcag

SEQ ID NO: 37935 - DNA, 201 bp, Bos taurus
ccaaagcaatttttgcccacatcctttatcagtagaaaccataatgaatcgtgttagtagccagcatttattgaaaatttcatcttagaatgttggccagmtgtcattatagcagaattaagtgcagcctgagagccttgctataatgtacagaatctctcttcatcactgttctggagttgttttgggtctgcctccaaa

SEQ ID NO: 37936 - DNA, 201 bp, Bos taurus
ctttgtagggcaggtcatgagcaatggagtggcaatttttataagcttctccatatcaaggataaggttagagtgcataaaggggaaagaaggatgaaagkaaggagacatatttcagtcagcagagaacttttctctcggtttccttggtttctaaaccaaatgacctggaaactgaaattgaagtttgtttcagttttc

SEQ ID NO: 37937 - DNA, 201 bp, Bos taurus
tgctggatgctacagaaagatatacttttaacatacaaaacatttctgaatccaacaagtgcccaataatttaataatgtaatgactagtggacttactckagtccactaaaccaatatttctcagagtattttaggctaggttagcatttattctgacagatgacctgcaatgccatccctacaagaaaattgccatatt

SEQ ID NO: 37938 - DNA, 201 bp, Bos taurus
gaagcatacatttagaacctgactggataagagaaaagtaatggaaacagggagataaatataggttgtagtagtcagaaaatgcctcctaagacttgagytgcacaagaaaagaaaatatatatgttgaatataactatcttggatagtttattctggatgtttgttttgtctacttcaatttcaagatttttgagaaca

SEQ ID NO: 37939 - DNA, 201 bp, Bos taurus
cagtattcttgcctggaaaattccctggacagaggggcctggtggactctggtccatggagttgcaaggagttggttacagttgagtgactgagtgcacamacacatctaaagatctttgccttactcaaggctgcaaagcttctcttctatgtagtcttctagaacttttatactcaaatctatgaagcattttgagtta

SEQ ID NO: 37940 - DNA, 201 bp, Bos taurus
ttttggaattttaggtgatcaaactgttagatgccagtgagtaagttctggagttgggggaccagcccttatctgccttatgctaaacatgcatttgcctstaaaaaatactcgagagagatcacttagtgtagatgaggaatatacatttttcaatttccccttgaaagcactaattctagcagaaccagtttataggac

SEQ ID NO: 37941 - DNA, 201 bp, Bos taurus
tcttaagaagctagatcatttggacctgcgtcttagccaactgtccaaggtcagcaaaatgctatggcatgttctgtttgatggccccaggcaggaagccmtggcattctcactattaatatctcttgacctttcgacttacaaatagaagcatccctgtggccatttttttttcctgtatatccctgaaaaaccaaggat

SEQ ID NO: 37942 - DNA, 201 bp, Bos taurus
atcaagtataagctgcagctctttcccacatgaagctcactcagtgttttcattttccaggattgactcactctcagaagatgaaaggtggccgggggtgrgggggtggcggtgggggagtggtctgaaatgatctaaaataactgcagtgtacaaagcagctgattaaattattttgaagggctgatgaatgctttcaaa

SEQ ID NO: 37943 - DNA, 201 bp, Bos taurus
ttggatataaaaacctttggctacagagctatgctgaagttctctaatgcaaagcaaacaggtatagtactaatcattctctgtatacgtaattcactgcytccacagctgctatggcttcctcttggagaaagtatcttattctttcttattatcagttcctagtattaagcattcaataaagattagctgtatggaatg

SEQ ID NO: 37944 - DNA, 201 bp, Bos taurus
gtaaaaatcactaaggcaaatggaaatgctctaaatctgcccaaaacaggtaacgcctggagttctagagcagagtaaataaaggttcaccgagaggccaygacaccaacagatgccccttcctaatggagtggatgggctgaggaacctgctgatggtcattacttccctctggagcagtggccactcaccttggctgca

SEQ ID NO: 37945 - DNA, 201 bp, Bos taurus
tgggattatatgtactgcaacttatatttttaactcccagtttatcaaaattattactcaagatagccacatatgaattaaacttacaattttacatactrtggacataccaaaagcctggtattttcatataagaacttgtgacattggctactggaagcctaaggcctttattttttggttaccctcacccacttgttt

SEQ ID NO: 37946 - DNA, 201 bp, Bos taurus
ggtcattcccactttaaatgaagaatgacactattgtacatgcagtaaagtaggaggaggatcactccttaccagctctgtatagatataaagctgtaaaygtaacgtgtgaactactcaaagcacaaattttcctcaaactcatagtcactattcataaatatgagggagttgctgtcacttacagactggttctgcgta

SEQ ID NO: 37947 - DNA, 201 bp, Bos taurus
tttatcacagcttcttctctagtatcttcacaccacagatatagctttcttattatgttaattgtgttatattttggccataatgatagctcttctgattrtacttggttttctagcactaaagttgttgatctttccaacctctgtaagctttaccttgggtctccatataagtctccttaataatgttacacatgttaa

SEQ ID NO: 37948 - DNA, 201 bp, Bos taurus
ataaatggatctctgttctgtggaaacaaacagttagagctcttgctccaaaatgactactgtgtgatacatgatgatacattgcgcatggtgtggcatarcagatgattgttacaagtcttagtgtgctgagaagagcttcagagtatacatgcaacatttcctctgaaaacacacaaatctttaatttttgtgagctag

SEQ ID NO: 37949 - DNA, 201 bp, Bos taurus
tcccaaatcctgtttcgtgtgctctcttctgtacagcagggtgtaattttgcttgtgttatatgtaagcaccttttcccagcacgctctcatctacacatrcctttccttgtgccaaacactattatgctctatcaatttactcttctcaagtctttagttatgtgattttgctaggtatgcctaatttttctgttcatct

SEQ ID NO: 37950 - DNA, 201 bp, Bos taurus
tagtatctccataattacttttgaaattactagccacctgtcagcgcagggattactactatgaagaatgtcaaatgggaattaaagttttgtattaggtyaccagcattctaccatagacatattgtagatggataggactgtttcagcacacagttttattagatacaataaatttggaggcgacatactctcctgtta

SEQ ID NO: 37951 - DNA, 201 bp, Bos taurus
agcctggtaggctacagtccatggggttgcaaagagtcggacatgattgagactaacactttcttacttaatcttctcaagaacaaatgatgtaggtactrtatttttaggctcaattttcaaatgtaaaactgaggatcagagaggttaagaaaattttccaaggtcacataggtggtgaagtgggaaatttgggaatca

SEQ ID NO: 37952 - DNA, 201 bp, Bos taurus
agagcctgggattcaatgtattattaatcattatttctggaatcataatggctattttgagcaagggaggaaaatggtatctgaaaatagaccccactgargaaaacaaagacccatattccagcctcattctttttcttcttatatcagaattggtactctgtaagtgcctgtttggatcactttatctatggagtgcat

SEQ ID NO: 37953 - DNA, 201 bp, Bos taurus
tgtgtcaggagcaaaaggttactaggcatgttccctgcactcagaaccacaatggggtggcaaaccaagtaagcccatctcaggcccaaccactagacacrtctctgctctcaaccccatccaacggacttgctcatctgctcattagggagtgagctaacaagggaacctgctacttgttctcgtagaggccttgctgca

SEQ ID NO: 37954 - DNA, 201 bp, Bos taurus
catgacatagtcataagtgtaatatgcaatcagataacttatcccaggtctatacatggtagagctgctaaatagaacagttaaatgctttgactgaatgygcaggtgctttcactgatatgccacaaaaatcaaattaattaacatatatgacacatatgtatctaaagtagtatacactaagttatgactgatgataga

SEQ ID NO: 37955 - DNA, 201 bp, Bos taurus
accaacaacctgcttgtcccaagctggcagaaagttctcacatgaggatcccatttttttagctaagccaattaatacctaagagttaggtgccactgggytggggattttgtgatgttgtacaatgtacctcagcaactaaacaacaacactgtgctatttttattcctttcataaaatttctgtatagtgcagacaccc

SEQ ID NO: 37956 - DNA, 201 bp, Bos taurus
atatccatctttttgtattcctttcccacataagtcatcacagagtattgagaaaattccctgtggtatacagtaggtccttattagttatctgttttgtrgacagtactgtgtatatatcaatttcaatctcccaatttattcctcagccctttcccatcctggtaaccataagtttgttttctttatctgtgactttat

SEQ ID NO: 37957 - DNA, 201 bp, Bos taurus
agataagagaagtgtaagtgtggtccttgacttctgtattcctggaagtccactcttcactgtgattatagaagtctaagaagattccatccatctgtctyctggctacagggtagatgttgcatttgccactgctaaagagtgaagacagtgggaaacaataataagtgtacaacatctagaatagaaggttaagtaaaa

SEQ ID NO: 37958 - DNA, 201 bp, Bos taurus
catggcccttgtgtctatactctgggagattattttcttaaccattattctcagggacacatctgaagtgagttttatgtagtatacattcctttgtgtcyatacagttttcatggccacttttgttagtttatctttggagacctgaagttttgttttataacaaattgtgaaaggcattttaatccaagcctgtaactc

SEQ ID NO: 37959 - DNA, 201 bp, Bos taurus
tgtcagtagattattgtggtaaatgttattgaatttccaaagaaagaaaggtgtcatcaagtggaaagaaacatccaaattaatagcttttatttaaggcrtaattctgtggaggtctccttattgctggtacctttctgactaggattaaaaaaatagatggggaacagttggcatcaaattaaaaaaaaaaaattagca

SEQ ID NO: 37960 - DNA, 201 bp, Bos taurus
aacgaaagcacagaaagcagaaagagattttttggttacatttatcatctttgtccttgcacactcttacttagatgggtaaggccccagccccatttttrctaatattgtggagaaaaaaaaaattttttttatttcaatgtcttatctggaagctgtcattggccaatgtccactagctaaaatctcccttctatggtg

SEQ ID NO: 37961 - DNA, 201 bp, Bos taurus
ccttatctctccttctacttgcctggcttacatctctctcatagcatgtgttgaaaagcaaagaaaacacttgctcacttaaacctctggaatgtgattcraagcctatcttcttagccattaatacataactgcctcaggatttccgtttcttctcatctatgacttcacagagatagagtgtgggttttttgctttcat

SEQ ID NO: 37962 - DNA, 201 bp, Bos taurus
aactggggaaaaaatgccttaaaatatctggcccttgtcatatctaagatctaccttccagaatatcagtttttacaagagtgttcaaaggaaagaatttmaaccaaggccttcaaacattaaacactaacttgttctaaagtccataaagagattccagaacacctgtggtggacgctctaagaaagggagtgaatgcct

SEQ ID NO: 37963 - DNA, 201 bp, Bos taurus
agtttatttctaagacaaaatggtaacacatctctatgtatgctatgtaaagtacccatccattctagagattcctaaacttatcataagctagagtcacrtggacatttacgaatgctttaattaggaaaacttgcatatggcatcatattttcagcaatgttaatacttaacatatttttcttattttctaaaagcttg

SEQ ID NO: 37964 - DNA, 201 bp, Bos taurus
gctatttaccaaggtgttgaaatgctaaattacgagagtgaagaggaaaaaaatatactagagagcggatatttttctatacatttctttatttctgtcaygtaattcctgagagttcaacattaacagtgccacactctactactagccaaacatttatcacattagtaatttattgaggccaacaccaattttcagaga

SEQ ID NO: 37965 - DNA, 201 bp, Bos taurus
agctgtaacactggtctgttgtttcaaatccttgctgtgatgagacaaaatagactggaatagagttagaaaatagaaatagaaatctatgcatttgcaakaagtaatatcaaagttcttagaatcccagatatcatcaagttcatctcccagtcaaaagcaaggcattgaactgtcaggtcatttatctaaggaaaagca

SEQ ID NO: 37966 - DNA, 201 bp, Bos taurus
agattatttttctattatctgaattaaggaagaatttaatagcatgcctatctatttcaatttcatgaacctcatgattgattagccatggccaaatatcrcagcttgccaaacttactgattttacctcaccctgcttttcatgacagctatcatgcttattgtgtcatttgtaattaacctatggcactcggcctctgc

SEQ ID NO: 37967 - DNA, 201 bp, Bos taurus
tttcatgggcccattgccaaattatttgggaattattactgcactaaaaaaatcttttggaaaattttaacgttttgaaatttatatttatttctgaattytgtggttgagctgacagggaaagatataactgagaaattgatttaccagatattcattctatttataaaagacttcacagtaatattctaagtgatggat

SEQ ID NO: 37968 - DNA, 201 bp, Bos taurus
accttttaggcatcctggctaatcgatgaatttcctgactcgagttagctgctcgttcttggtcctgttagctaagatcatccggggatccgggtgtctcrtgtggaaaatgtggccacctggtgcaatctgttcattacaagctctgagtgtcattgaagtgtcaccacaaacacaattttcccattagacatcaattgt

SEQ ID NO: 37969 - DNA, 201 bp, Bos taurus
ggttattgagaaatcaaaacatttagattctcatggaaatttgcctaaagcaggcatgaacatactgaggtgtaaaataatgattagttcatgactagaartgttgccctgggatttttttggtctgttttggattatccttaatgggagcaaagaatacaaaggattttctcaacatgtacagagttgtatttctcacag

SEQ ID NO: 37970 - DNA, 201 bp, Bos taurus
tgccaatcattagctgttcatgtaattatattttctaggttcaagttcaattctcttcaaaaataaataaagggacataaagaattttgactgcattttgkggggcttctattcattatattttcccatagaaacttcacatataagacaatttatattttgtcaaaaggcagagaagatagttttgttaatgtagaagac

SEQ ID NO: 37971 - DNA, 201 bp, Bos taurus
taaagataatggatatgaattctggctgccaattggcaatatctagcccatggagtagacctgatgacttttgtgctgtttctaacattccttccataagrgcagtcaatagcagctgtacctacagtacgcactccagcccagtatgggaaagaccaagtaacaatgaaaagaacctgtgcaacccagatggtcctacct

SEQ ID NO: 37972 - DNA, 201 bp, Bos taurus
gctgagggcagatatatggatggccataaaaaggaattagaacaaataattttaaactcttcagatatttcttttactagttctcatctctgcccttcctrtacattgtttcccctcgtccctctgaagactgactttttttttttgctttgtgcacaagcaaattacagatgaagcacagctctctagctaatatgtcgg

SEQ ID NO: 37973 - DNA, 201 bp, Bos taurus
tggcagtttgtacaaatgcaaagggtatagttgcatacaccatggttagcttaaactggcacagaaaagcatttctttttctgacaagcagaagcccacayggagcaagataaacatacagataaagaagactaaacacaatagaagtgtgccaggaaatgcattaggtagccatcccacggtcttccagggtcaaatata

SEQ ID NO: 37974 - DNA, 201 bp, Bos taurus
aaggatgtatagatactgactatgattaaactgaaggctaacagatatacatttttcaaaaatgtatgactgatcaccatttacctttggtatattacagrcaggatatgtttcaagtattgtttaaatcaagagaaatttcccagtgcacagcagtgttacagttaatacaaatcctctagggtagaggctaagcaactg

SEQ ID NO: 37975 - DNA, 201 bp, Bos taurus
cttacaaggcccgcctgcagtccaacggctgggacttgacctccctggagccccagctagcccctcaggtccttcgccgcatggaggacctggaagtgggraagatcacggcggggttcgagcaaatcacgcaccaggcagtgagaaaactcagcaaagctgagatgcagaaggtcctgaaagaggcctgaactccacgag

SEQ ID NO: 37976 - DNA, 201 bp, Bos taurus
caaagagtcaaacacgactgagtgactgatctgatctgatctgataaactggaactacgttattcattttaatatttgagtcataaacatgccaatctcastacacttttgccatcactgggtattaactttttctaattggatgggtaaaagatgattttttttattttattgcatttatttgatttttagtcaaattag

SEQ ID NO: 37977 - DNA, 201 bp, Bos taurus
tgagttacagcataatctaaagttatataaatatttacttagatgacaaaatacttagctgtaaaataatattacctttggagatattttaaaatttacartatgaatgattttaatctcagatggtataaaacaaatgcaataatattttctcttgagtgcttagactgtttcagaaacaaagatacgagttaatttcta

SEQ ID NO: 37978 - DNA, 201 bp, Bos taurus
agaagggtaaggcaacccattccagtattcttgcctgcagaattccatggacagaggagcctagcaggctacagtccatggagtcacaaagagtcggacaygaccgaatgactaatactttcactgtcactctgcctttatctcacatgctagcaatgtaatgatcaaacttttccaagccaggcttcaacaatacgtaaa

SEQ ID NO: 37979 - DNA, 201 bp, Bos taurus
ggacagacgggtacagggccatgtgaaagccacagggtctgacgcaaagcctaggactggggtcaggaaggaggactaagtgcacttcagctcagggaaayggcctgagtcaaggctaagaggagaaggatgtcagaaggccatcagagagggagtcagaagacttggctcatttgttgggtacacactgaacttaaaaca

SEQ ID NO: 37980 - DNA, 201 bp, Bos taurus
ttctgtatctcctgacacagtgtggccagagatacaagatttcacctcactgtgttaatgctggaaaattttcatgaagaatcagaaaaatccagaatgckgaacaatcttctggaacagtaggcctgaactctttgaagaattaaatattgtgggaaaagacaggagaagtggagaactgcttctgaattgggggagcat

SEQ ID NO: 37981 - DNA, 201 bp, Bos taurus
ccatggttgcagcagaaaaacccaggtaaggaataaatgcatgagcttctagctacataggccatggacagctttacagaaatttccatgcttcacatggygacacagcagtagaaatacgtctgcattctcaaattgtgaactagtttctggtagtcctgaaaatcctgctggacccttcttttctgagaaacagaaatg

SEQ ID NO: 37982 - DNA, 201 bp, Bos taurus
ttaaatggtgaactatttcagacttgctgcatctcattttttcactaaaaatatatcttggatatcattttatataaacacatgaagctagatctgttttwcccccagtggctgcatagctgtttgtagatgtaccagaattatttatccactttcctgttgatggatattttggtagttttcattcttccctactgccat

SEQ ID NO: 37983 - DNA, 201 bp, Bos taurus
aacacaaaaattaagtgaagtggggaattgggccaccatgacaacttcagaaaaaaggagccatcttctaagtacttttacacaaaagaggaaaatgaatkaatgagaattaatgaattaaagagaatttagagttttggacaaagttctaactaaaatagtatatcatacaacgtaacctcctcatttaataaatatgtt

SEQ ID NO: 37984 - DNA, 201 bp, Bos taurus
atggacagaggagcctggcaggctacagtccatggggtcgcaagagtcggacacgactgagcgacttacttcactatggtcacaataagggttaagaagtrttctcaaagtggtaaagaggaatacagttgagttcaacatatagatttgtttgtttggaagaggttttagggaatttatatggttataaatttatgcatt

SEQ ID NO: 37985 - DNA, 201 bp, Bos taurus
ggtgatggacagggaggcctggcgtgctgcaattcatggggtcccaaagagttggacacgactgagcaactgaactgaactgaataatgtgactattagtrcccttgatgttgtaccagaggcctcttaaaatgttctcagtttttaaaattatttttctgtttttttgttcagtttcagtgatttctactactctatttt

SEQ ID NO: 37986 - DNA, 201 bp, Bos taurus
gaatattaaacaatcagtcaggggcctgtgctatgtttttatagcaaactactcaaatcccataaagatgaaatgtctgatggtcatttacactcatttaytgttggactgtgaagaaggctgaatgccgaagaattgatgcttttgaactgtggtgttggagtagactcttgagagtcccttggactgcaaggagatcca

SEQ ID NO: 37987 - DNA, 201 bp, Bos taurus
ctaagttactaaaatgatcctgggataagaactatactctaggaaccttgattagaataaggctatcaaaatccattttagtcagtaatttatagtcattwagttttagttactttagagagatttactaatctcatttactcagtgcccatttgtgcacatttcattattagaaggctacctttattttagattatgaat

SEQ ID NO: 37988 - DNA, 201 bp, Bos taurus
gctctgaagttatcctgactttaatcttattttgattaaaaagtgacattgggacatcgtgtttgtttgtgtagcagttcagtctcaactgaagattaatkacaaggtgaatccaggcacaatagttcttggcttccctgatgactcagtggtaaagcatcggcctgcaatgtaagatacccaagttccatccctgggtcg

SEQ ID NO: 37989 - DNA, 201 bp, Bos taurus
ctagttctgagaatctacttgtgaaataacaatgaataatatcagagcccagatttaaaatccctgaaattgcagtggtttctctgtggccaacaacaaaraaatatgccccttctgtgagcttgctagcacgtcaatgcacagcaggcttgtaaataattttctaagcactcactctgcagtgagtgttgagaaaggcca

SEQ ID NO: 37990 - DNA, 201 bp, Bos taurus
taaaattttctgctgaggtcaggattagtttaggaactgagcgcatagcatacagccttcctggtgatctcagctaaagctggtctagaccacagagctgyccaacagaaagtcctgtgttgatggaaatgctctaattcactacccaatgtgagactcattagccatatatgactgttgagcagctgaaatatggtatga

SEQ ID NO: 37991 - DNA, 201 bp, Bos taurus
agtttccttgagatactcaaaagctctactctctcccttatcctaaacaatgtcaaacattatagtttttgttatagcagcatttaaatcttgggtgttcrcttctgtctggattagtttttgcagcataccaagttagcctaagatttagtagcctaaaatgacatcgttctgtgagttgactactgttgattgagtggt

SEQ ID NO: 37992 - DNA, 201 bp, Bos taurus
gaaaaattcacagaaataatatttgagctcctggctgagagaagctggatggtggtgctgtgctgcaatgggaatggccaacagatggcagcagcctgaaygcagcatcgggagtcaggagtgtagctggcaactcgctaaggttgaagattaatggtctcacaatgtacaaaggtacacagaggacactggggccccgaa

SEQ ID NO: 37993 - DNA, 201 bp, Bos taurus
cagcgtctcttatgtctaacctgcattggcaggcgggttctttaccactagcgccacctaggaagcaccagctgtaaagtcaccatggattttaaactcayagagggtaggcacccctaaactcctcaactttcaagaggcaactgtatttgcatacaatctaaactaagtcatctcaagattattttaataccttataca

SEQ ID NO: 37994 - DNA, 201 bp, Bos taurus
caaaaagttaacatggatccattggcacctaccaatggtattgaccaagcacatagttaaactttattcagttgaaaaagtgtgtctatgttgtcattcartgccacataaatagtactggagtccaactagaaaattgaatgcaggtgatttgacgactttgtacttttattcaatattttagtaagttgacataagcca

SEQ ID NO: 37995 - DNA, 201 bp, Bos taurus
tgacagccggcccctcgcctgagagcggagccccgaggtggaacggggtgacaacctgacaacgctctcccaaaacacgagcgacaggaataaaaacaacygggcctgcaacttcagtgaaccagaaaacaggaaaaatctggctcagaaagcgcagaggcggccgcgcgggctcaagcgccagcggactccaagcgcagc

SEQ ID NO: 37996 - DNA, 201 bp, Bos taurus
tcttatttactcttggggcaggatacttcatatatgtatagaggttgggctgcccactgtgatgtgactttgtagcttagctgtgagaagattttggacastaccagctcttatggtagcttttacagtagcaactcccatgagaaaggcctagaattcttctaaacaagataggcttgatttccccaatgtcatcacgag

SEQ ID NO: 37997 - DNA, 201 bp, Bos taurus
atctaggttggtcataacttttcttagttttaaaaacaaacagatgttggtgaggggagggataaaccaggagcttgggatgaacacacatgactatacayaaaatagttagccaacaaagacctatggtacagcacagaaaaatacactgaatattctgtagtaatctttatgtgaaatgaatctgaaaaagaatggata

SEQ ID NO: 37998 - DNA, 201 bp, Bos taurus
tttgtatataggaaacagaactaattttctatccaacccctggcccaactggctcctctttaaaatgcaaatattctgaatggcttaaaccttcattgtcmaggtgctccagaggccttgttcacatcttattttcagtctcaggcaaatctcttcctatcctagctcagtcaccatccttttgctgctaagtcctgagtc

SEQ ID NO: 37999 - DNA, 201 bp, Bos taurus
aacactacatcaaaccctccttgatctatatgattttacctcacttatcactcagtctatgtccctacaagattctggccattctctttccagacttttcmcattgcaggcttgtaccttcttccttttgtcctctatcattttgctcctaaaatctgaaaggagcattctcttctgtctgaagtttcagcttaagttctc

SEQ ID NO: 38000 - DNA, 201 bp, Bos taurus
ttttattggctgaggcttgctacgtggaccaatgtaattgtcaagacttccccctttcttcacaaaagtatcccagtttatatgataaatagtatggccaycctaagaataattcattattaaagcaggagaggatatagtttctcctgctttctttcacgtgggcttagcccagtatagtcaatcttccccaggccaatt

SEQ ID NO: 38001 - DNA, 201 bp, Bos taurus
gaatataacattaatatctcattttttaagaattaagtatattaagtattcagacttaatattactgatggctatagaaactagcaaatctcctaacagayggtatttagggggtagtatgtaaagaactttggcagagctgattttataggttgcattgatcaatctggaaaccagtgtccaggttgcagctatacagaa

SEQ ID NO: 38002 - DNA, 201 bp, Bos taurus
ttcagagtcccattgctaactagccaaagggagaaaaggcctttatttcctcatattgtttgggagggatgttgaaaaagctaatatgatcaaagaaatayctgcattacccaggcctctgcttatgcccggaactcacactgttccatttttcaactctgcttgtctcagcaattgagttggtctctgttgaacttcata

SEQ ID NO: 38003 - DNA, 201 bp, Bos taurus
tttgctttgaaatttttattttaaagtcaaatatttaagtggtgtttgggaatatgttggattgtagtggatagattttgaaagcaatcttagaaaagttrtgcttgaaacaaattgaaatcacttgctctgggatgttgcagcaaggacaagggaatacagaacacagttgttaattttctgtacacaacattctttctg

SEQ ID NO: 38004 - DNA, 201 bp, Bos taurus
ttttatgtccttgtctctagaaagcctgcatatgtggagcaatcatgtgactgtcacaagacaaagatagcaggcaggtctagatatggtgcttgatcatygatgaactccttgagcagctctgttatttagacacataactctgaatgtccttgcacatgagttaatggactgcttttgtctatgaggttatgctttggc

SEQ ID NO: 38005 - DNA, 201 bp, Bos taurus
gtgagggacagggatgcctggcgtgctgcagtccagggggtggacaagactaggcaactgaactgaactgaagatgcttggttgggattaagaaataaggyaaaagaatttgcagtcttcatatgcaaacacagctgaataaaataaaaccataacttaaaaataagtctatgctttaaaaagtaaaacaatgagagatgt

SEQ ID NO: 38006 - DNA, 201 bp, Bos taurus
tgacttgtgtgttcattgacagaaagaataaatatgaaaatgatctagccctacttctgcctaacaattagtatcagtcatacaatcatatttctgttttrtggagccattagtattatactaacaacaggaagtttgttaatttctaaatgcttttgatgtctgaatccttttctcacctaatcacaactggaaataggt

SEQ ID NO: 38007 - DNA, 201 bp, Bos taurus
ttggccactcctgaaccaatcactagtaaagaggaaaaagcaatcatgattggctcagatctatagtctggtaaagaacaaatactggagaaccaatcacyatgtccattacacgatttcacttgatcatcacactcactcacttggttacataggagagacataaaccacacagagaatagtttctcacagagaaagagg

SEQ ID NO: 38008 - DNA, 201 bp, Bos taurus
tcaacttctctccaccattcaaattaaatgcctcattttaatattgcacacacatcccaatgtctggagtatttaaaggaataattgtgaattttttcgarggcttcataatattaggaaaccagagaacttttggttcttaacaaaaagttatttttagtttctttttttgggaagagagtgttggaaaggtttttattt

SEQ ID NO: 38009 - DNA, 201 bp, Bos taurus
ttacatttattgtctcttataacaagacatccggagttcaggcaggttcaggatgacttagtttcagggctccgtgccatggtcaccaggctctttaaacrtttacctccatcatccttggcccatagacttcagaccttgggctcatcccagtatcacctcctgacggagctgtgtccagacataggaaaaagaagcttc

SEQ ID NO: 38010 - DNA, 201 bp, Bos taurus
tctcatacatacatattgtatacatgttcttttccattgtaggttattagaagatattgaatatagttccctgtgcttgtttaactgttttataaatagtygggtatacctgtttatcccagtctcctaattatcttctcccctcccacactctcccctggtaaccataagtttgttttctctctgtgaatctatttctgg

SEQ ID NO: 38011 - DNA, 201 bp, Bos taurus
ttttcaggattttgtcattaaggaaactgacggctagcactggtacaaagaaacagaaaaataaagttggaaaacaagcataaggaggcaaattaaacttyatcgacagtctcctatgaagcatcaaaatgatgtagccgactggaataccaaagaagacccagagcatttttagtctgaaattatgcattttgtgcacaa

SEQ ID NO: 38012 - DNA, 201 bp, Bos taurus
ggcaggggggatggaaggtaaggacaagacatcagacctcagaggacaagagtcggatactagagggccttgagtgcaacgtcagaggattcagatcctaytgccaagagggatgagccttgtcaaactttacatacttgtgttttagaatcatctggaagcagactggaaggatgaactgtagttggttacaactaaggc

SEQ ID NO: 38013 - DNA, 201 bp, Bos taurus
cttagcagaaacaggggctaaagattatttcatgtgttaattcagcagatacttttgatcacctactatgaatcagtgatgtgctgggccctcagatacartactgggaaaaataaacagttataaaccagcacccattctaggctagggtgagaaacagaaaatacacaagtaaaaatagaacatgtcaggtggtaagtg

SEQ ID NO: 38014 - DNA, 201 bp, Bos taurus
ctttggcaacaacaagcttcaccctcatgggaagctgcattggagcaagaggtgtcgagtgggcacctgatgcggatgagtgtatgtgctgggatgctcayggaaaaccagccagagcttcaggagcttcagcctgcttcctctgcattcaccacagaatgagcatgtgtgtgcaagtgattcacatcagagtctaggatt

SEQ ID NO: 38015 - DNA, 201 bp, Bos taurus
agggccagcaatggctttctcaggcaactgagaaacttgcaggaatgctaaaggcaaatcttcatagtgtccagctatccctatagggaaatccattcaakttaactttaaaaacttactctcctggggacagaaataagaactagacactatgtgatcaaagcaccatgatggtcttctactaccagagggataactgaa

SEQ ID NO: 38016 - DNA, 201 bp, Bos taurus
acacagctactaagtggaagctaggttctaacaggaagaaagtgagctaatcatgttaaagtatcatggaacacatgagttacagcacattttgtctgcayagcagtttgtgtgtcctttttatctcaagagttcagagtggcttgtccccagggaccagtaagaagtggaggcacccagatcacctgggctccaatatgt

SEQ ID NO: 38017 - DNA, 201 bp, Bos taurus
tgtgcaggcctcctgcacacaccaccacctcggggtagacaaaacacctaagccactcctccacccctgggcacacccctaccctcaccttacgaaacagrgatccccaaccctggggccacagatcactccgtggcctgttaggaaactgagccatacagcaggtgagcagcaagtgagccaataaagcttcatctgtat

SEQ ID NO: 38018 - DNA, 201 bp, Bos taurus
gctggtcctggggcctgcgtaactctcaccacaggtgaggaggctgaagctacagacatttacagtcctgcagttctggagataaggtatcacagggctgrttcccgctgaggcctctctccttggcatgcagacagctgtctcctccccatgccttcacatggtcgtccctgtgtgcctgtgtccttatctcctcctctt

SEQ ID NO: 38019 - DNA, 201 bp, Bos taurus
tgtagcgaatgacattggcgtggcagatgaagatctcatagctgtcctcctgctgcttggcgtccgcccggtggatatagttccggaaggcggcctcgatycgtgctccatcttcataatactgctgggggcagaagaaggaatcgtgcgtatggaggcagtgtgggccccgctgccaccaggagcccaagggcagagagg

SEQ ID NO: 38020 - DNA, 201 bp, Bos taurus
ttgctgagatatttatggccttccctgcatttctttatcagtcacttttactaaggacctcctgagtagctcttgttaccctaagttaataagacacagaygggcccgactccttgtcctgggacacttctggacggccattcacatcgtggaagctgccagtgcagtgttacaagcccgccccacagttcctgttagcta

SEQ ID NO: 38021 - DNA, 201 bp, Bos taurus
atggcacttcatccacacgacctcgcggctctcttgatgcccccatggctggccgcgctgctcccatctcacgctgaagatgggggccagagaggcaaagygactggcttgagatagctcggcaggaggttttggtgctgaagtccaaacagaggcttgtgtcctccttccaggctgtatcgcaaaggggaggggacagga

SEQ ID NO: 38022 - DNA, 201 bp, Bos taurus
gagatggccctacaagccatcctgagagctgcggaagcctgtggggatatgtgcagtctccttccctgggagagccctcagagaatgagctctggtggagrgtggtttactctggcctctggaggcttgccttaaattgcttccccagagaacagagactgatgatgtcttgaatcagtttcctgtggaatctagtcttcc

SEQ ID NO: 38023 - DNA, 201 bp, Bos taurus
agattcacaccgaggtcccgcctcccaggtgcccttggtcctgtgtcttggctcttgctgggcaggtgctgtgccctggcctgggaaggacagcaattggkattcaacggcaaacctaaacccctctggtgacttcatccccacaggttaggcactccacagggtccctgacccgtgagaacagggtgctgtggggccaga

SEQ ID NO: 38024 - DNA, 201 bp, Bos taurus
caagcctgtcatcaaggaaagcggttgtttgtgcgaagcggagaccagacctgaatgtaccacgagttctagtatctcgtgcctatgtggccagtctggcraactctctcactgctgttctgctgggggcacaggttcaatccgtggtcaggtcaggaaactaggaccctatataccatgtggcatggccaaaaacgaaag

SEQ ID NO: 38025 - DNA, 201 bp, Bos taurus
gcataaacagaaaccaaaccccaggaagatggtccttggcaccgccattcacgaaatgcaaattactctagcagataacgcgtgctcctctcttgatagcyggaaggtatacctgtcaggggttggcaaactcaagacacacacgctcacgtcgggggcggtggtaggggggatcacgcagcttagaggattcagttaaga

SEQ ID NO: 38026 - DNA, 201 bp, Bos taurus
cccctgacgaggcagagccgggacctccacccataacgatctggccccagggtcgtatgctaaacctgcacaagtctatccaggccacagagctgttcccrttcctcagtgtacgtgagacctgatccctggtcctcggagtagaggcagcaaaggggaactcaggcaccagcctgccagtggcctggctggtggtcaggg

SEQ ID NO: 38027 - DNA, 201 bp, Bos taurus
gggcctgggagtgtccaggcgctcacctgtccatccatccccagagatcctcctctactctctgctgacagagcatggttctctcttcctgtggaacctcrtccaggcccatgccctggcctcactcacactcacaaaggggaacttaggacatttaccgcagtagtctttttttgaaaaaatttttatttggctgcacaa

SEQ ID NO: 38028 - DNA, 201 bp, Bos taurus
tcagtggaagtcctttggacaggagtctgctctcacccctagcatccaaaataaagcaaactttcctttccaccaacctggcctcttgattggctttcackcagtgaacagctggaccccaattttggttacagtgggaactcctctttctgggttgatctcagcgccggcttctcctgcctgctcattggccccttggac

SEQ ID NO: 38029 - DNA, 201 bp, Bos taurus
cttgacttttctgagaatttgctgaattttccactttgcctttattttttgcttttagcagggtcactgagttactgttggcatacaatgaaaggggtgcrtgcatatgtggtcagccttgtctgactctttgtgatctcatggactgtagtctgccagactcctctgtccatgggattctctaggcaagaatactggagt

SEQ ID NO: 38030 - DNA, 201 bp, Bos taurus
aaggaaataaattgttggcaatattttgtgaggtcatttgggaacctcctctgtgtcttggtttaaaagttttgtgcttaagagtttgtgaaagtcagatkgatcagcttgggcaacagcttaaggctcttttcctgaatatagcagctggaagaaaaaagcaaaatcagtgagaagattctgtggtcgcctcaagtgcca

SEQ ID NO: 38031 - DNA, 201 bp, Bos taurus
cagagccaagggaggccccggggaccacagccagcagccccgtggccccagctgcaagtcctcccaggaacagagccacatttcctccgagtgttgcccgyacctgatgttcatgacccagggcccctccaacacccaggtctgactgacaggtgcagtttccccttcaaggatgatgcctaccagccctgcaggacggtg

SEQ ID NO: 38032 - DNA, 201 bp, Bos taurus
gaaaacttttgtgtaaggaaggtaaaatataaattacatagcacacactcaaatacaaccatacatatacatgggcttaatatatatatatatacacaaaygtgcatttttcttttctaaaaaaaacagtggaagggtaaaccaaaaacaaataaactgattacctgtgaggagggtgatcaacagaaataagtcttgacc

SEQ ID NO: 38033 - DNA, 201 bp, Bos taurus
tgggaagaaactaagaatttgaaatacagtgactttcattgactgaattgtgctggtctctcactgactgagttgttgccaggccaggagaaaaaactttytcttgttggcagtagtaatgtcacttcccagcaaggtaccatctcttcctgctgggatctgtattgacattgagtgagagctcctcctctggcctcttga

SEQ ID NO: 38034 - DNA, 201 bp, Bos taurus
cagtgcacgaagcactgttcacgccattcaggggcctttaatttccagctaattgctacttaaaatcattttctaccatgtctgtgcggcacactgcacaytggctgtgttgtttttctctcctgagagctggggtgggtcccacagagcacagcttcgtaaacaaaaggagcctggggcaattgctggctttctagcctc

SEQ ID NO: 38035 - DNA, 201 bp, Bos taurus
cataggctgcagctgcggagcctgcacaccatgactagaaggaaacccaggccctgcaatgaagacccaagtgccgcaactaagacctaatgcagccagayaagtaagtattttttgaaaggccacctgtatgtcagttagttgaggaggtcagaactgtgaccaaaacaagtgtctgtgcccttgtggagacagcagtgt

SEQ ID NO: 38036 - DNA, 201 bp, Bos taurus
acagcaccgtccccacagaagggccaaggctcctttcaggtgacctcacctggttaacagcactcccattgaccttcaggctctattgttaactttgggckgtctggcctcacatcctgtctgaccacttccttcatgggcacttgccatggtgtaaaatcaggaatctcccaaaactcatactcttggtcacttttgtag

SEQ ID NO: 38037 - DNA, 201 bp, Bos taurus
tacctggccttgagtcttgctgtgtactgggggtgtgcttgcatgctagtcctttggtgttgtagcctttactgctgttgcgggatgtggatccaagggtyggcgtcactggccaagggaatactggagcagacggactgtgtggatgtgaggcaagagaccccgaaggggtggaatgtggggaaagagcgatctgccaag

SEQ ID NO: 38038 - DNA, 201 bp, Bos taurus
cttcagagcctgagacctgaaaggccagctccagccaaaaccctacgtgtgatctttcaggtccatcacaagtcattgtaaggctttgactgacaggcccrcaggggatgttgccctccccacaccagacttggtgaacagccaagaacagcctttctgagttttctgaaaggatttccatcaaggactcaggtcccctgg

SEQ ID NO: 38039 - DNA, 201 bp, Bos taurus
ttgagatggttaactaaaggtagtttcctaatgctgcatccaaagtagaggttgctgtgtgtgaattcaatggaccataatgactgtggcccaggaaatcmcatctctgtccccagtagagagtttttcttcctctcttatattagagagaactccaagggaactggatttctcagcatttcttctcctttttccggggag

SEQ ID NO: 38040 - DNA, 201 bp, Bos taurus
tgtaaatctccaagaaattaacattcagtagaactcatggggatttggaccatgcttttgtcttttctgcaggacaaaatgtctcaaaagtcaaggtgatyagtgggttcctagaaaacagatgacatggcaacactttgctttcctggctctatttatggatagaaggtacacatcaggtcatcattccactttttcctc

SEQ ID NO: 38041 - DNA, 201 bp, Bos taurus
gaaggatcgtagacacacagcaggcctgtacttctctttagagagtgttgagtgtggcttagcatagtgatagtcatcgtgatgattggggtttgctttcrgcacctgtaggtggggcccagaatgacagatggttccacacaatgaagaatgtcccttacgcagtttgaaattctaatgttctgcagacatttttgtagg

SEQ ID NO: 38042 - DNA, 201 bp, Bos taurus
catgctgaaaccgggcccagtgccatcatctgagaaactctagacccaagaattctgctgcaggaacatctgttgcagaagcagactctgtcctttttttycccaacatttattttatattggcctggagttgattaatgaagtgttggtttcaggtatacaacaaagtaattcatttatacatacactatgttatctatt

SEQ ID NO: 38043 - DNA, 201 bp, Bos taurus
cggctttctccagttgcagcaagcaggggctactctttagttgtgctgcataggcttctcattgtgatgacttctcttggggagtgtgggctctagggcckgcaggctatgctcagtatttgccattcccaggctctagagcacaggctcaggatttgcggggcagaggctttgttgttctgcagcacgtgggaccttccc

SEQ ID NO: 38044 - DNA, 201 bp, Bos taurus
ttctgttggaccaagcatctctgcgaatgtaaataagatgaggatctcaagatgagaccaccatggataaaggtgagggggaaatccaagaatgagtgtcyttttagaagagagaaaagaagacatagtgtatcagttcaagtgccacggtaaaatacaagatggggtggcttacaggatggacctttattttcaaggttc

SEQ ID NO: 38045 - DNA, 201 bp, Bos taurus
atttttaaatcccagctagaacttcaaaactactttagaactcccgaagagacgccgctgtgcttgttagctttaagaagcacacagctttattgacaaaygcatcacctccataactaagaaaaggggtgatcgacaatttcatatttccactttcagggctcgttagatcattacctccagaattgcggctgacatgcc

SEQ ID NO: 38046 - DNA, 201 bp, Bos taurus
taccctgaaaagagaccagcatctccacatctgtgctgccagcttgcagaaactgccacatggaggtctgcacctggcctctgctcatagggtctcaactrgacacttgagtacttttttcttacatcaaagaagaatggaagcccaagaactaaagttatggctccagctcccagtctgtgctggcctcagactgccctg

SEQ ID NO: 38047 - DNA, 201 bp, Bos taurus
gacacaattggaaccaaagaggccctggactccagacaaagagagcagcgtttcatgtgacgtgatggttagggaatacacatgcacgcccgcatcttagygatgaggccgtcaggaatttttatcaaggccccgtttcccaagtttccttccaacatgatgaatcaaagctcagcacctctaattaagggtgaccttcac

SEQ ID NO: 38048 - DNA, 201 bp, Bos taurus
tactggccattgcctattacttcccagagaaattacaataaaggctcttgtccacattttcctcccctttctctgcctcctgagtgacactgctgcttccrcaagtggtcctgggtggcctgacatgccccttcctcatgggaatggtaacaaactatgttttttctatctgagacttatggttataacttccttttactt

SEQ ID NO: 38049 - DNA, 201 bp, Bos taurus
tcactccagtctctggctccatctccacgtgatcctgctttcttctctgtgttttctcctcttcctacaaggatatttggtattggattgagggcccaccyggttaattcatgttgatagcaccataagatcttagtcacatctgcaaaggatctttttttccaatgtggccacattcatgggcgccaagttgtcttatct

SEQ ID NO: 38050 - DNA, 201 bp, Bos taurus
atacagactgcattttctgcctaaagctcagttgactggatgaattacaattaatcccaaggacttcaattgttaacacagtgcaatgttaattgaccccmtgttaaatagcaaatatttgcattgtctctagagattcatcttaacaggaaattagatcacatttgaatatggaaactgtccagggaattaactgttctt

SEQ ID NO: 38051 - DNA, 201 bp, Bos taurus
ccctgtgcatggaattctccaggcaagaatactggagtggattgccattcccttctcccggaaaatccatttgtgtaccctaactcaggcacacggaggcrccaggcctaagaggagctgggggtgggcaggagaaggcactcagggtgggagcaggtccccgcagagagtgccactgggaatctggacccaggtttaagt

SEQ ID NO: 38052 - DNA, 201 bp, Bos taurus
cagtcccactctcccactttaccccaccaccacccgcgtggccacacgtccattctctacatctgtgtctctattcccgccctgaaaatagatagacattkctccaagaaagatagacagatggccgagagacacaggaaaagatgctcaataacactaattgttagagaaatgcaaatagaaactgcaatgagataacac

SEQ ID NO: 38053 - DNA, 201 bp, Bos taurus
catccaaccatctcatcccctgttgccctcttctcctggcctcaatctttcccagcatcagggtctttttcaatgagtcgactcttctcatcaggtggccrtatacactgagaaagtcttatttctctaggcaatcctcaggcgatcctgaggatttgatccctgatcagggaattaggatctcacatgacacagcatggc

SEQ ID NO: 38054 - DNA, 201 bp, Bos taurus
ctatagcagcaagaggagactaatatagacacagagaactagacactggaagacccgtgaaatgtcacctgttacttccaaggcctggaaaagctgcccckggcttcctctccaagctcatctctttcctgtgcctttccccagctgtctgtatcccatggcttggcctttctttgagtccctcaagttaaacaagcttat

SEQ ID NO: 38055 - DNA, 201 bp, Bos taurus
gaaagaaactctgccgacacaccagtgagtatggaagaagagtcttccccagctgaacctcagatgagaatgctcgcgtttaacgctgggatccccaactyccaggccacaggccagtatcaggccattaggcagttttgttctatgggagcctaggattaattaggaactgggccacacagcaggaggtgagtggcagac

SEQ ID NO: 38056 - DNA, 201 bp, Bos taurus
agcaaccacaccattttacatttccatgaacaggagtccagtttctctacattcttgtcgacacttggtatcatcagccttttgtattttggccatcctgytgttctcattatagatttaaagattttttgatgtggacaatttttaaagtctctactgaatttattgcagtattgcttctgttttatgttttggtttttt

SEQ ID NO: 38057 - DNA, 201 bp, Bos taurus
caggggcaagagactaggaccagggaggaggccaagagcccaggccatggggcatctatgacagcacagatccgggcaaagtaggaagagtcagcacagcygtgatgaggggaaggggaggccttagggctctgagttcaagaaagaaagctggtgtcccagcaacgatgcctgcccgtcctccaaaccctgcaagagaac

SEQ ID NO: 38058 - DNA, 201 bp, Bos taurus
agttgttccagcttctcctccacgctggggccactggggccgcctcgccagtagaagcccatgggaccggtcatgaagtagatggccaccacgaaacacargggcagcacggcattctcaggctcgccctcgtacttgtgcaggatgtacacgcaggacatggagaacagaatgacccgcaccacccagaagaagcggcca

SEQ ID NO: 38059 - DNA, 201 bp, Bos taurus
actgttccttgtgagcagacattcctagccaggcagccgtcaagctactgagaggggagggtgggggcagagagctgccccgtagcattttagggcctggmgatggtcacaatgcaagaacaaatgaatgtggcacatgcctggtggcgccccttgataagggtgaggggagagctgacgctattctatttcacacagggt

SEQ ID NO: 38060 - DNA, 201 bp, Bos taurus
gtgtggccaaaaagtttaaaaaaaaaaaaaaaaaaaggcaagtgctggttggaaaggaaagattgctttatttaggaggccagcaatgtggggagaaggcrgattcacgtccaaaaaccaactctaaagattctgctcaaccatgaaagtttttaaagggagaatcttttggagaaaaggtcagggcctttatcttcttcc

SEQ ID NO: 38061 - DNA, 201 bp, Bos taurus
ccattagctctcaaaccagattttcacaggcttgtgaaggacttctggccctctggggacaggctgatgttgcaccagctttatacctaaatggccaagcygaacctgccgcaagtaaagaaggttatggagagtcaggatgccaagagctgtgggtctgagccctgtgtagtctcctgctcctgcagaatcttggccaag

SEQ ID NO: 38062 - DNA, 201 bp, Bos taurus
ccccaggcttttgagctgctgaccttccccctgcagcatcctcttctgtaggtgccacaggcagtggcccatgcccaggccacagggtgcagtgaaacctrtacagaattgaaattctagagttttggctccctgccccaaatcggtgtgtctgtggccaaaccaagtggccttgtacctgtaaaaacgaggacagctcca

SEQ ID NO: 38063 - DNA, 201 bp, Bos taurus
cttgggtgagtcaggccagccacttgttttgtgaataaagttttattgacacagggccacacacacctgttgaggaattaccatggcagcttttctgttamaacagcagagttgaatagtcatgacaaaccgcaaagcttgacatattcaccatctggtcctttgtagaaaaagtctgctgaccactgagttagaggaaaa

SEQ ID NO: 38064 - DNA, 201 bp, Bos taurus
tatagagaccccacttgtcctgttcacctgctgaaggaactttggatgagccccaagttcagggcggtttcaaagagtcctgctctgcacattccagtacrtgatttttggtggccatatgcacatgttcatagaatggctggatcatagggttggtgtgcgttgaacattctgagaaactgctcaacctctttgccgagt

SEQ ID NO: 38065 - DNA, 201 bp, Bos taurus
gctggaggctgcccagaaagagcgggaggaggacaggcagggccaagtggcgccatcacagccccaccagccttggccacctccttccttagacgcacctyccctgaaacaagcagcactgagctgactgtgctgatgtgatgccccgggggcagcccctcctggccagggtcgggggaggacggggtgctggtgcccctg

SEQ ID NO: 38066 - DNA, 201 bp, Bos taurus
gggctacagtccataaggtcacaaagaatcagacataattgaagtgactgagtacacacataccctaagttacccatccagctttgcgcttgattccagarcttccaatgtggtaaccatcaggcatgtgtggctattgaggccttgaagtgtggctagttcaaactgagatgtggtgtattgtgctgtatgagtttaaag

SEQ ID NO: 38067 - DNA, 201 bp, Bos taurus
tgtctttcaccattggctcccaaacacttgtccccctctttccagtgtggttaaattgattctaagaagcttattttttacatttgaacaactctgaaatyggaatacatttttacactatagtgtcttattttaattggcagcgttttttcctcttagcattttatgactgtgcagggtcttcactgctgcgtgggcttt

SEQ ID NO: 38068 - DNA, 201 bp, Bos taurus
taataaaccaaaaacatcaggcagaagtcctgtgagaaggtggccatgtgtccgtcctgttaaggaagagagaccacagaaccgagtggggaggggcacaygagccatagaagcatgggggccccccggactggccactcccaggccctccgccactggaagccgggcctcccagtgaccgacaccacccaggtccccacc

SEQ ID NO: 38069 - DNA, 201 bp, Bos taurus
aatatattaaaaaaaaattctgaaccctgtttgctgtctcaggcagatttctggagcagttctgctacttgagggtagcaacatgcagaaaaagtatacaygtggcaccacatgtacatacgcacatgtgcatgtactgacataagtgtgcatatccatacacatatacagacatatgtgcatgcccaggcaggcacacag

SEQ ID NO: 38070 - DNA, 201 bp, Bos taurus
tcgttgtgcctgtgagctttctctagttgcagagtttggggctactctctagttttggtgtccgggcttcttcttgccgtggcttctctccttgtggagcrcgggctctctgtgcacaggctctttagttgcagcatgcaggctcggtagttgtggcttgctggctctaaggcacgtgagcttcagtagcagcatgggggc

SEQ ID NO: 38071 - DNA, 201 bp, Bos taurus
tgtggcctgggttcagccgggatgggacctcaggctgtttgccacccacagtatggggacacgacacacaccctggtggagaagatgaactatactggccrgttcctgcctggattcgaggcaccaccattcatggacccccaactttccaagctgtgagtgccccttggaacaggggagggtggaaagcaaggccctttc

SEQ ID NO: 38072 - DNA, 201 bp, Bos taurus
agaaaaaccaagcaggaatccaagctcgaagggccagtagtctctggatttaagagaaataaacactgccatgtcaagagatttttgaggtcctagttctyggcccacaccattagtggaaagtgggtagaaagcatgcatggaataagatgacacatgagcctctaaaggctccagtgactaagatgcctgtgtctacta

SEQ ID NO: 38073 - DNA, 201 bp, Bos taurus
aagcacctgcaggatttgattcaggggagtggcatgatcagtgttggcctgaggaaggtcccacatggagactgaattttgggggacaaggaggccgtggrggcttcagctgtgtgtgccaggcatgaggttacagagatgagcacgggacagtgccagccctcatagggcttctggcctcttgaggaagatgaatctgga

SEQ ID NO: 38074 - DNA, 201 bp, Bos taurus
caggtgcctaaaaataggctctcagaaaccaaagagccttgggccatttacttttttttttttttggtttctctccatattaaattgtggaagaaaaaaaktaattcccaatacaggctatgtggcccaataatgtgacaaagaagcagaaatctctatgatgaatgtgtcttttgttaatcccaccggagactctacaat

SEQ ID NO: 38075 - DNA, 201 bp, Bos taurus
aagaggtatgcttgttctcgcttgtgcagaaaacattgttccagattcaatcgactgggttcatgtcccctcacatagtttttaaggttatttatttaaakgtctaatgtattttattgtaacagacattgttttgccaacattgcctatttcagtggcacttcacaatctagtttaaaaagaaaaataaaacattttaaa

SEQ ID NO: 38076 - DNA, 201 bp, Bos taurus
cctcaccaggtacctgcaaggaaggcagtgtcggcctcatcctccctgcccatggactcacaggcagctcttgcctgaaacttgctctaggttctttcctrtcagcaagtgggctgaaggcccatcccctcagtgttttggtttttgccaccccatacccagactgacctctttcctttgcccaggaaatagcattcttac

SEQ ID NO: 38077 - DNA, 201 bp, Bos taurus
tgagctgagtgagtgagggagccaggcgcacaatgtgaggcaacggcaaggtgtgcaaggcagatcgcatggtttggccttggaatttcataccagaaacraggggagtaataaggagttcctggcaggagacactgtgtcgaaccagcccctagggtgcccatgacaggggcaatctgactgggagcaaggccagcaaac

SEQ ID NO: 38078 - DNA, 201 bp, Bos taurus
tttggggacaatggaggcctttgttatctttcccttcttcgagtgggccactgtctgtatgagaatccagattacccttgttggtggcgctgatgattacytctgagaatctgttcctaccggcctctccaggcaggctgggggtgaatcgggggctgcacaaagccaagaatgttatcacggtgaaccaggacaggcccg

SEQ ID NO: 38079 - DNA, 201 bp, Bos taurus
aggaatcttattatgggatgggaagttactgcttaatgggtacagagtttttgtttgggggctgaagattgtggaaaaagatagtgatgatggttgcacarcattgtgattgtaattaatgtcactgaactgtatatttagaaatggctaaaatgacattttatgttaaatatatatattttgtaatatttattttgggct

SEQ ID NO: 38080 - DNA, 201 bp, Bos taurus
caaatttgagcctaagaaagtgacccctagtggacctagactgcccggttcttcttgtgtcacccacgcactaccattatggtcactgccttgcatgctckctccgtgaggctcaaggcaacacctggaagcctctcatgtgcccctctgtgaggggtattacagtgattcctgctcaacagatgaggaaatgaaggtgtg

SEQ ID NO: 38081 - DNA, 201 bp, Bos taurus
ccggccggggctttgagattgcccagggccgactgggtcccggcaggatccatcactgcatgcggctgattggctgctcggagagggcgctggcgctcatraaggcccgagtaagtacttctctttgcgcctgtctctggaccagaacgacccatctgtcttcctttcagacttctaatcctaactgtttcctgagagcag

SEQ ID NO: 38082 - DNA, 201 bp, Bos taurus
ggaagcactagaagtgcaaccttaattaaacagttcgggattttctaattagcagcaatgaggtaatctgctatgaggatcctctccatttcccccacgcyccccaccacagaggatgagaaggtaacccacatgatgtcctgaccaaaaagatatcctagcttgaaaatacagtgatccttaatttttttcctgctaatc

SEQ ID NO: 38083 - DNA, 201 bp, Bos taurus
cctccacagtttggtatttgtgcttgtgggcagctccgttggtactttggattttttaaaatcaggagaaaagaaatggagtttttaggtaaaagaaagtrttttcatagataatgtttttatctttatatatttatatatatatataaatttttttaatggagaaaggagtccaggactgcttaatactagagctatgaa

SEQ ID NO: 38084 - DNA, 201 bp, Bos taurus
gaattctggctttccccaccacctcaccacgcttcccctgccgtgcagtttcctcattcttagtgatcagtaaatattcaatggtgaggataatgctgacyaaagtttgcactgttagcttcaagaaaattctcagaaatcattcatttcctggccaccatttggagtaaaacataactaggatttctgcagcccttcctt

SEQ ID NO: 38085 - DNA, 201 bp, Bos taurus
agtcctttgaaggatttactactgttatcacttgtattttataaagaaactgaagcttagagaggtcaagtggcttgcttaaggtcacacagcaaggaaaygatggaaccagtggtttaatcagacatgggcaaccagaccaatataaaaatttaggcctcacagataggccagtgggtaacagatcaccttaggtgaacc

SEQ ID NO: 38086 - DNA, 201 bp, Bos taurus
atacataagagcagcagacatgacaacccacaaaagaaatacaattgcttaacgtgaaaagatgttctagtttgccagaaattgttttcttttaatggtgyctacttccagttaagacaagcaggagtggctataaatgaatgacagtgacatagcactgcctttaaaaatatatcttaaaaatagaaaaatacgttaaag

SEQ ID NO: 38087 - DNA, 201 bp, Bos taurus
tgtctaggatttcagtccattactttactctataagtacatgacacctggtagtccaaatacatcatgagctcctcagaggtaaaaccttgggatataccytctgtgtagtgtgtggtggtgagagatggtggtgagagatcaggctctgaagttagacacacttggcttaacaccccagtgcagtgacatgctgaactct

SEQ ID NO: 38088 - DNA, 201 bp, Bos taurus
cttaattgtgagtggcttggaggaagccacacatggggtgattttacaaaaggctattatgttggcatatgggtttcacgatctgtggccatcacagcaayggctatttttagcttcccagaaaaggttgggcaggagctatttttctttttttctttcccccttcaatgctggaattggccactgtgtggtataacctgg

SEQ ID NO: 38089 - DNA, 201 bp, Bos taurus
tagctctgacaacctctacagtctgtgtaactaaggatttgtacccaaaatggaaagtgtcgtcagtagataactgatccggccactttcccactaaattytataagagaaccagaactgtctgaacataagtgtgatgaaatgagaagatgtcaatggcaaatgacggagataatgatgatgtagttctattttgctggg

SEQ ID NO: 38090 - DNA, 201 bp, Bos taurus
atgtggagtggccgcaggacttgatcctgacgagactttgcaggagctttactgacaactgttaatcctggcgaaaagccagaactcatctgccttgagcrcctctcggcctccactccgattctccccagctgaagtctgtagagacagccaggcctgggcctcagaggctgaagccaaggtgaactctgtcccctgatc

SEQ ID NO: 38091 - DNA, 201 bp, Bos taurus
cattagctgcaagataagatacaaagtgaaatgttatgtccccttttatttgttttgcaactgtaaaatgtgcaacattttcatcatgatagaaaaggtaragaagggaaaactcccagcattttggcctaatgcaatggagcatgacctgtcaattgcgccatcttgcagaaaaacctactactaacactatccagggaa

SEQ ID NO: 38092 - DNA, 201 bp, Bos taurus
agagtcagacaccactgagcgactttcactttcacacctgtactgggcacaaactcagacagcatcagtgggcatgcttggacaggtggtggacataatcygtgagaccaaactgagtagagaccattctggcaacaagggctgaaagctgaccacaccctgggttgggaaaagccacgtgggggtgagatgtggcggggc

SEQ ID NO: 38093 - DNA, 201 bp, Bos taurus
cagaggcttctctcttccaaaaaatcaggcctccgtgccagcagagtcaaaggggaaataatgtgaaattctaaaccctttcctgaaagaaagagcaaaakagagtgaggatgacttatatcggccatctctaaaaaacggggtgtatggtgggcagagctagaggcagagggaaacaaataagaaacatacctacatgct

SEQ ID NO: 38094 - DNA, 201 bp, Bos taurus
aaagcacttttggacctatttatacatcaattttttatcacatataactctagcacatattttcttttaaaaaaagaagcataatacatcagctaagatcrtccaaaaatgttttcaatacaaagtctgggtcttctgaatcatttttaaaaccagtgtccatgttttcttataagctgtggtcctgtgtgccgtgaaaag

SEQ ID NO: 38095 - DNA, 201 bp, Bos taurus
aatacatgaataagtgaaagatctcatctctgttggctcactgtccgctgtccaaatacatgcaacgttttttcaaaataaaattacaagttctggtaacrctaggcccctcccataatggcaacactgggctggagctgagctgataccctggacagagcccaggtgctccaggtccccacggtggccaaaatttgctgc

SEQ ID NO: 38096 - DNA, 201 bp, Bos taurus
gcagcccttcccaatgggtgttacaagcacaactgggctgtgagcacaagatgtcgttggcccccaggggcagaaagtggcctcaccacttcacccccccrggggagctgtggaaacaccatgttttttggtgagactggcaagtactgctcttgagttctcaatgaacagcatcctcttcatcagaccagtttaccttaa

SEQ ID NO: 38097 - DNA, 201 bp, Bos taurus
ttacgacagtacaccttcctgcctgaacaacccagctgtcccaaggtctccaccagtggttcacaccctagaaaatgtcccaccatttcccacggagggcygtaaaggctgaagtcctgctcagatagagcacttcaccaggaacacccgttttccaacgggttatttggtttgagtttctcatcggagccacactccatt

SEQ ID NO: 38098 - DNA, 201 bp, Bos taurus
acaaactctgacagcaaaagtgtaatgttaaatatatgtactttacaaacaaatgactgaagcccaaagtatagtatgtaaaaaaaattcctttttttttyccttgatatagctattttattgaagtagagttgacttacaatttttcaggtgctcagcaaagtgattcagttatacatatacatatatattatttttcag

SEQ ID NO: 38099 - DNA, 201 bp, Bos taurus
atcaaattaacacatacttccttaagagtactagttcattaaagcaagtaatatttaagtatgactttactacctatttctcttccaaacctgttatcacrtttttttttcttaaatagtatttgactttttttaaagtggtcctttatgtccttccatctagatagggcttatctttagttgtccttccaaacacgatta

SEQ ID NO: 38100 - DNA, 201 bp, Bos taurus
atagatagtccagccatgaatgagtttgtctgttccaggaaaatttcatttacagaaataggcagcaagccaaatttgccctttgggccatagtgtacccrctcttgacttagagggtcatttactggtaagtagctaattagtgatggaactgcgatttgaacacgtttggggggaccctgtaaacctgtatgcctggcc

SEQ ID NO: 38101 - DNA, 201 bp, Bos taurus
taaaattaaatgtttgtcaatccagcatatctaaaatgtcatctcaacatataatcttggtaaattattgaacatttttagatttttgtttttgtactgartcttcaaaataaagcatgtattctgtagctaacaacccatcttaattgggacttgccacatttcagaaggttagtaaccacatgtggctagtggctactg

SEQ ID NO: 38102 - DNA, 201 bp, Bos taurus
gaactgagggttattcttaggtgtttggcctaagaactaaatgaatggcggtgccattatttgaagtgtgaagacttggggtgcatcagattgggcttgaygattcaggcctgtttagacatttaatgtttgtgaagtagacagttgggtttgtgagcctggagatttgaggaaggctggatatataaagttcacttaaca

SEQ ID NO: 38103 - DNA, 201 bp, Bos taurus
tggcacatagtaggcctccaggcatgtttgttgaatgactgaatgactgttttgaatgtcataatatagtaataatatagtcacaaccccatgcagtgacygctttctgtctaccaggccctgtgtgaagcccttgacatgtgtaaccttgtctaatcctccaaacaacctatgaggtcaatagtgttattatgcccactt

SEQ ID NO: 38104 - DNA, 201 bp, Bos taurus
atcggattcttccctcctggtggcaggtccacactcatcctcctggccagtggcttttcccccaagttggggaaagcagggcagggcctctgctttttttyccattagattcatggttttccgaagtcatagactgaagaaaaagcacagggaaatggaatgaccttcagcttattcatggaggccccatgttaaccagga

SEQ ID NO: 38105 - DNA, 201 bp, Bos taurus
agatgcctaaagattttccccagcttcttcctcctctctctcatgtctttcctctgccccggtgccccctacctcaaggaaggcggtagattttcatttcyctttcttggcccattcatcctgaccttgctgtccagaataaatcctcagaaagccccaagccttggggctggatgcccgaacagtgtcaggcgtgatgtc

SEQ ID NO: 38106 - DNA, 201 bp, Bos taurus
aacgccagacactcccctgccaccccgaaaaacagcaacatcttcactccctctttctccacaaggcggcagtggggaggcaggaagagcctcactctgargtcagtatggcccagtgctaatagctgcttttaccaccagataactggagtgagtcactttgcctctcagagcctctgctttcccctctgtacaatggga

SEQ ID NO: 38107 - DNA, 201 bp, Bos taurus
gctttcagaggcggcaggagtttatcggctgcctcagccctggggtgaccccggaaatccgctaaaagggaaacaagggagtgttgctttgtcagtagtgrtggataagagctccctccttgggtgaaggagttttgaggatgctgatggcaaggggtgccagggcagagaggaaactgaggctggagctgagggtaggaa

SEQ ID NO: 38108 - DNA, 201 bp, Bos taurus
gcgagctgggctatgctgctctccacaggtttgagtggttcaaggacctgggactgaagtggtacggcctccctgctgtgtccaacatgctcctggagatyggcggcctggagttcagcgcgtgtcccttcagcggctggtacatgggcacagagattggcgtccgcgactactgcgacagctcccgatacaacatcctgg

SEQ ID NO: 38109 - DNA, 201 bp, Bos taurus
tacccaagcaggaaggtaccttgtcctaacacagctctggactcccaccgttctccacctgccccttctccagtgggccagccttgcagttaacctgtagkagctaacttctgaagttagaacctagttactctactctcttaagctgaaaagatttccagttgctatagtgaatgaagctctgggggccgtgatccagcc

SEQ ID NO: 38110 - DNA, 201 bp, Bos taurus
gccattttccagttccctgggtgtcagagaaggaacgatgccattcagtgctgcagacaccaaacaggtgaatattgaaatgatgctgcacaaaaggacayccccctggcagatctgggcaggctggaagaaaggtagcatttattgacatcagaagctggggagagatttctatgactacagagattgggtgagggtctt

SEQ ID NO: 38111 - DNA, 201 bp, Bos taurus
gacacaacttaacacatcacagtccctaagcatatgcatgtgtaaatagtttttccatttcatttcaaaagactgctcttctcctgattatacttcaagamacgtggatctcattgcagttccttcatttgcagttgtggtgtctgaggcccagagagagatagtcaccagctcaagatcacaaagcagattagaggcagg

SEQ ID NO: 38112 - DNA, 201 bp, Bos taurus
aggtgggtgcaggcgtccagcatccgtgcgcctcctgccacttggagcccccagccggaaacctggacccctcgctgctcagcctgcagatcagaaagcaygggcagtgggcccacccttcagtgttctgagtcagaaatgttgatttgttatagtaacatgagcacaggggaaagacgagaggcaagtgagcaagcgaga

SEQ ID NO: 38113 - DNA, 201 bp, Bos taurus
ccttcctttttggacttttatgaaggcttcactaaatagtcatgattgattaacttactggccattggtgattgattcaacctcaattgattggccagtgrgaatcactggagaaaggctggaggtcaggagggagggaatgactgggctgttctgtttctccagctcctcttgggtggcctctcttccatgtccttcgcc

SEQ ID NO: 38114 - DNA, 201 bp, Bos taurus
gatcatgcagaggagtgaggggcagagatttgccattcagaatttcaaagagagtccaagagccttgaagtacatgatgtggcttccactcaccgaccacrtgctgtctgtctctcattggcttaacacactatccatatcccctggaaggatgaaagggccacattgatgctgccagaaccccagacagtggttccaggg

SEQ ID NO: 38115 - DNA, 201 bp, Bos taurus
cacttaaggctacttttgaaagtaagcttatttttaaactggtttctcagtataacactaggctggaggcatgaatgcatgtactgtgtgtttgtataccrtatccctagttgttttgcacataataaaaggaagaagtcaggagggaagggaggaagggaccatctagtacagtggagagagttttaaaaggtgcagtca

SEQ ID NO: 38116 - DNA, 201 bp, Bos taurus
cagtcactgaagggttcttagcaggtgagggtcacactgggactcgtgtttgggagggaacactgccccttgctcaccttcgtagtgtcatctagcatcaygccttccggccttccctgggctctggtccctctgatcttctctcattttcagtgatgaaaatgcttccatccttccaggcttctacagaagccattcctt

SEQ ID NO: 38117 - DNA, 201 bp, Bos taurus
gtggtctgcatctagctctctgactgtctcccactttacctccttgggcttaccatgctgcagtcgtatctgctctcctcctttttcttaaagagctgtayctgttcctacctcagggcctttgcctctgcggttccctctgcctgggactccctttctcaagttcctttcatggctgattcctttcattgcttaaggctt

SEQ ID NO: 38118 - DNA, 201 bp, Bos taurus
agacacgtttgggatttgaacgtaggcagtgccatctcctagctgtgactgacacatgctcagctgggttcattcgaggttggcctttcttctatcagaayggctctccctgtaagtcaccagatatgcctggggtccctatgccccgccccactttcagggtctctcgatgctattcttctgggccggcagtaaaatgac

SEQ ID NO: 38119 - DNA, 201 bp, Bos taurus
ttagatatttttctttaaatagatcattttgaaaagatttatttctagctgttttctttggctcattactaatatgtattgttagtgtcctgataacccayttcagccttctttctgaggtaaaggcattaaagtatttttttaaaatgaccttctggaagcttaatttgcctcattctcaatgtgtgctcagtcgctgag

SEQ ID NO: 38120 - DNA, 201 bp, Bos taurus
cttatgctgatatccctactttgtgggtatttgcccaaaccagagaagatgtggcacctggaaacttgggtgatggctgccttgagcttcatggcccatayctcaaaggaatagtgccagacaccatccttctatgggatcatagttttattacttttaacaccagggttgatggagcaaaaacttatagatgtgtcctga

SEQ ID NO: 38121 - DNA, 201 bp, Bos taurus
tcttacggttttggtggctggaagtccaaggccttggtatcatcaggattggtttctggtggagtctctccttccagctagtattaatagatggcttcttyctcaggggcccacttagggccttttcactgtgtgtacaccctgctggggtcttcctgtttttataaggacatcagtcctctgggatcacagtccactctg

SEQ ID NO: 38122 - DNA, 201 bp, Bos taurus
taatggatgtgtctcctttccctccccactctctggagtcagggacagggacaggatcccgtggagcttctgctgtggcccctctgcatcatgccccaacratgctcttaggactttggcacggcagtgaccataactgtctatgatgatggccgagacggccaaagcctctctctgcagcccaaagggtccccagggccc

SEQ ID NO: 38123 - DNA, 201 bp, Bos taurus
cccaaccttttttttgcaagtccactctgaaccccaagagacaggtgatcttgaaactgataataagaggcattcttccctgctgacgcaaaaggctaagraagttcaacacagattgaagtagagagacatgataaagttcagtttaaagaaaaagagggagatttagagggagggagagaaacagggagagagataaag

SEQ ID NO: 38124 - DNA, 201 bp, Bos taurus
ccaaggccccagagaaatgaatgaaactgttttggacaccccctgctctgcccctccagatcagagatcagaaccctttctctacaaaatgccagatatcmaacactgaaggctttgcaggccatccagcatctgttgttcctactctactcttacagcatgaaggcatcatagacagtatataaaagaatgggcatgata

SEQ ID NO: 38125 - DNA, 201 bp, Bos taurus
agagtcggacacaactgagcgacggagcacacgcatgcaagagctaggaagaggatggcaggcagtgagggtggcagaaggaaaagtcctgagatcagaaygagcttgggatgtccaggggacacatgggatgagggaaggggagccctgagtaattcctgagccaggggctgatagcagtgaccttgttcccatggcaac

SEQ ID NO: 38126 - DNA, 201 bp, Bos taurus
ctgactctgtgactacaaagatggtgcccttattgcatcaagcaccgaggctccaaggccaaccgggcatgagggctgggccgctcccccctccccaaccstgaccttacgggacgccctctgcagaggtaaacggcgggtgggagctggcaaagcaggcccagggcacagggttaggccctgataacccgagatcaaagc

SEQ ID NO: 38127 - DNA, 201 bp, Bos taurus
ttttgacaagagaccctgtgacttgtagagtcaaaaattttctttctgtggcctcttgcagaaaaagtttgctggcctcatgtctaaagaaaaggttggckactaccccctgatttttcaaaatggaaaacagcgctacaaatccggagaaagtctggaggcctttgaagtgaagtgaaatgaaagtcgctcagttgtgtc

SEQ ID NO: 38128 - DNA, 201 bp, Bos taurus
caaggagcttctgctcccctgaggttgagtctctttggttatcagcagaccacagcggcctgataactttgggcgaggaacacttagtttgaatgggaggyacccatcttcccaactttccatcgtggaagaagaaaatgccttggcaaagataaatgactccaattttaattcagacccgacatccatcttggcaaaaac

SEQ ID NO: 38129 - DNA, 201 bp, Bos taurus
aaggttttgatggagctgatttggtgtgaagctcaagcaggtctagctgggaaaattcctccagatggttaagtgcacagtgaaagttgagtgaatggatratgtccacagttgctcacaggacaagcatgctcctttcccttagtaactccctattctccggagacctgttgaacccactacccagatattcttaactcc

SEQ ID NO: 38130 - DNA, 201 bp, Bos taurus
aatattagctttaaatattagagtgagtaataaattattcacccagaccattgctggaaaaataagtgaggaattaagtttctaccatcagaacaactatyttacaatttgcaatgtttgaaaaagggaatgatgctaaagatctctaattctggcttcttacaaatagagagatgagggttgtgtttacaaaatataacc

SEQ ID NO: 38131 - DNA, 201 bp, Bos taurus
ggtggtagtggcaaagaatctgcctgccaatgcaggagacataagaggtatgggttcgatcactgggtcaggaagatcccctgaaggagaaaatagcaatygataaaataataaaaccaagagcgatctgcacacatcagtgaattccatttggatgtgtgtggcaaactgtgttttccaaaggtggccatggcaatattt

SEQ ID NO: 38132 - DNA, 201 bp, Bos taurus
accaactaagcaatgagggaagaaccatccaggtaggacctgctaactggtctctttttcgtttgtcatttttctgcccccactggccaactttgactttygggtttgaacaggtgggggtagagaaagagcaatgtgtggaagttcttgcttgactgactcaattaatggttctagcttctctagactgaccggccccca

SEQ ID NO: 38133 - DNA, 201 bp, Bos taurus
atataatatactaattttatattcactcagttaattattcaacagataactgtcagcactgtggcagacagacccaagggtggcccctcatgactctgaayccctggggttcatttaatcccctcctcctgaatgttgggtgttaccctatgacttgcttccggccaatagactatgggaaagaggaaggaattctgtaga

SEQ ID NO: 38134 - DNA, 201 bp, Bos taurus
tcttaatccttgataacttcctcagtctttcaaagagagacttgctccagctcgtagtgtcaacatggtatatcttcatcccattacttatcatcttcatrtgaaaaatgagtttcttgcagacaacatcattgagtgacttgcctaaaaacatgtttgaaaactacgtggactgtggctcactcccttcagtggcacata

SEQ ID NO: 38135 - DNA, 201 bp, Bos taurus
atgggattttccaggcaagagtactggattggggtgccattgccttctccagtaatgtgctcagtcatgtctaatctttgctaccctatggacagtagccyaccagtctcctctgtccatttttcatacaagaatactggactagcttgccattttctcctccaggggatcttcctgatccaggggtcgaacctgtgtctc

SEQ ID NO: 38136 - DNA, 201 bp, Bos taurus
aactggggtaaaacccgagctccttgttaggcctgggagccaccgccaggtctggctcaaggagtaaaaatcctctctagggtctcaaaaagtcgtgaagyctcacacttggccagtaagagaggctggtgagagagccctgaaattctccacgtggagtgtggaaactgtcagaacactgtcatttcagttatttatcca

SEQ ID NO: 38137 - DNA, 201 bp, Bos taurus
aaggagtgcagccagggactgaaggggacatggccccacgggaatgaggaatccaggctgtgtgctcccccgggcagcccatgttctagaaaggcagggckgcacagtggttagcagcgtggccgtgaaatcagagctgcctcctccatctgtgtgaatgtgcacaagggctgttacgtcccgcaccccaggttactcgtc

SEQ ID NO: 38138 - DNA, 201 bp, Bos taurus
atcagacacgtccctgaactgggggatgtggggaacagtgggaggaattaacatttttctccttgcagagcctgccagtgttccatctcctcctacacttrggccccatggggatcgcatccaattatagatggacttccaagtctgggatcgcctttccatcctgcatcagcactgaaggttttcaaatgagtgagctaa

SEQ ID NO: 38139 - DNA, 201 bp, Bos taurus
gtgcctgatttgaaggccccttcgagagagtccactttctcaccctcagcctcgtctgaaccagcctggggtccatatagcccttggggaggatacaagcraggcccttcaaagctgatgtctatccattttcatgctgtgtgaagatgagtcttggactcaaatataaatgctcaaacagctaacatttcttgagtatgt

SEQ ID NO: 38140 - DNA, 201 bp, Bos taurus
ttcctcgaccgtccaggtgcactgcaggggcaatttacctcaagtaactccacctcctgcctgctctttaggatggatttttggcctttattgtatttttmtttattcatgctgccccgttttttaaaaaaaattatttatttatttacttgtctagctgggcctcggttacggcacacgggatcttccttgcatcttgca

SEQ ID NO: 38141 - DNA, 201 bp, Bos taurus
ttatgaacccctgggaaacccaatacagaacacgttcctttaaggacagtgtgtagtccccatgcacactgggaactttggaggtgtttttggaggctcgrctggccaccaggagtgttcctgccatcagcagatcaccttctcccagaccaggccatcaggctggtgctgagaccagaattataaggaagaggacttacc

SEQ ID NO: 38142 - DNA, 201 bp, Bos taurus
ggtgatgggctctggtttgggatgacctggggtttgaggtggacatctggggcggagcctagcagagggactgtcccgcctccgatgggcttgtgaacccrggccagaagagatgtattaatatctgagatgcttatgattggggcatggccttcctcccctgggtgaggcgttcagagtttctcagcccctgcccgtgag

SEQ ID NO: 38143 - DNA, 201 bp, Bos taurus
catgggatttgccaggcaagagtactggagtgggttgccatagtcacctggaaatagcagctaagttctccctggagataaatgctgggggcaagtctatycacctcctcccttcatctgtttcttccacatgtattgtgaaaccaaaagcctcaactgaaaaccacagacagtgataataataaccgcactgcagtcttt

SEQ ID NO: 38144 - DNA, 201 bp, Bos taurus
gttcttccacaggagtgcggggtctgaaccctatgttgagctctagggggcctgaaccgggaagatgagcccccagagcagttgattttgaaggccagggraccttcaggggtcccaggaagctgtagaaaatagaggcttcatcctttaaggatgcacacaaaatcttatgtgaaccgggacacagggcagaagtaactt

SEQ ID NO: 38145 - DNA, 201 bp, Bos taurus
caacatcagggctattgggccttctgctgtctctgcctcggatgccttcccccaccttgtgctacaagtggtttttcatccttcagccaccagttcaatcrtcacctcctcagagaggccctggtggctcagctggcaacgaacccgcctacaacgtgggagacctgggttcgatccctgtgttgggaagatcccctggag

SEQ ID NO: 38146 - DNA, 201 bp, Bos taurus
ttagaaggcagctgggtgggtgtcttgggccaaggaagcccagcacgactaagtactacagtcaccagccagaaaaaagagaaggggcagcacgtgagcaygcagcctgaggccgtccgtgggtgctagatgtccctgaggccttggcctggcacatagtaggtgcttgtggatgatttcctgtgaataaactgcaggagt

SEQ ID NO: 38147 - DNA, 201 bp, Bos taurus
tatggatcacagcacctgccctgagaatttcctccctgcccccatggctgatgtggggatcacaggagatgacagatactcttcacaagctgcaaagcatygcacccagaacctgcccccatcctctgccctgtggcatccaggaggcagcacttctacatttcttgcttattcttccagacgtttaatttctgaacactt

SEQ ID NO: 38148 - DNA, 201 bp, Bos taurus
tttcaataaaatggggtcacggcacctcctgggaggattatattactgtgagagtcttttcaggtggggattctgccaatgagactttggtactggccttyctcccttgtggaatcaaaaactaagacacctttccctgtctctccttgggggtgcactggaaacagtgtccctggaggccagcagacacacagtgtccac

SEQ ID NO: 38149 - DNA, 201 bp, Bos taurus
ctgttattgttatattcattatccactgtatactttttgtgttcaggaacatagacttacaatattcttgtagtgtcctttttaaccagatagaataaaayagtacatggtttatatggacttccctcatagctcagttggtagagaatccacctgcaatgcaggagaccccggttcgattcctggggcaggaggatcccc

SEQ ID NO: 38150 - DNA, 201 bp, Bos taurus
gatctctcacccttggattcacagcaggggtgggctgagggagctggggttgctgaagcccagagaaggcagggccttggcctgcgtcacccagcaagcckagggcagagggctgttgaccccaggctccaggcagggacatgttatttattgctagattggcctctgtcctcagtgagtttaatttctccactttctcac

SEQ ID NO: 38151 - DNA, 201 bp, Bos taurus
tgggttctgtctcttgtaggggaactaagatcccacaagccatgtgtctcagccaaaaccaaaacagaaccaaaaaggggattgcgaggacctgctgtgaycgggcgtggggttggggccaggggaaccaggccggccagggtggtggccctcggggaactgacctttgaggagggattgaggaaggagtcacagagatgc

SEQ ID NO: 38152 - DNA, 201 bp, Bos taurus
gatgtatcgggtcacttacattgagccactggtgaacgtttaacgttagctgggtcttggggggaaaagccccaatttgtatgtagcgtttccctattccygtggtgtaaatactcccaccagggcacactgcagggtaccaaatagctgtccttatacacagagctgggaagagatgtgcagtacatcatcattacacac

SEQ ID NO: 38153 - DNA, 201 bp, Bos taurus
tctgcaccagagattcccactcagagcctccttctttccctggggagccccgtacaagccccatcactcttagttaactcagaccttgccaggatccatgygtggctgatgttagaacttggcgatgtttcagggcaagaaaggaaaaggaatgggaggtgtgtcccccacgggaggcctgtggcccttttgctctcataa

SEQ ID NO: 38154 - DNA, 201 bp, Bos taurus
aaagctaatacaattctttctcctgatttttgcaaaatattttggtgggacattgggatagtttgcctttcctggatgtcacatacactcgggaggtaatkagtatccagacagtttgcagtggttcaaatgtagaaacaagggtaaacacattccacagttatctagtaagcaggtgttgggtcacagttttttattctt

SEQ ID NO: 38155 - DNA, 201 bp, Bos taurus
accccatctttggaagactggctttccccagtccagctgaagaggtgatgggcatgatgggggaggaggggtttccattaaagaaataaagttttaggccmatattttagaaagtaggcatgcaccagggtccccccattagctcttcttctgagctgagtttgatctgaaattttcccattcttttctgtctctgagacc

SEQ ID NO: 38156 - DNA, 201 bp, Bos taurus
ttctgccccctccatgctcgtgcctcctggcatcattgcttctgtaacgccatccgggaatgtgggctccagggcttccacccaacaaaacacactcctcrggccacagttctcagctctgatctgcatttgtttccagcctcctgggacacaccgcccttgaagacttcccgattccacgactgtccggagagagagaca

SEQ ID NO: 38157 - DNA, 201 bp, Bos taurus
gtccccagggtcctgatatttgggcagaagaagaggcaggggccactaacacctccgaaagttgagatgcatcccagggaccctggcttcccagagaagcytcaaatcaacatggccctcaaccatagactagcaataacccagcaagttggctagacttgaggcagccactcagaactcccagggggtgcagtaaaatcc

SEQ ID NO: 38158 - DNA, 201 bp, Bos taurus
tttgaattcttacagcagggcaccatgcttcccacattggtgtgcgacttgcttttctacttcttgggtccctttgctgtaattggaacaaggcccagaaytaatccgagatagactgtcttttgctggctgcctccccactctcgataccctgtacccacttctggggtcctttctctgatgcctcctctctgccacctc

SEQ ID NO: 38159 - DNA, 201 bp, Bos taurus
agaatatactacatattggaacccaataggaatccctaataacaccggcctgtgacacgttgttgctgctagagttttatctgtagcagtggttctcgacygggggaggggggtgcaattttggccccctgggaaacatttggcaatgtctagagacatttttggttgtcacagctgagcagggacgactgacatctagtg

SEQ ID NO: 38160 - DNA, 201 bp, Bos taurus
tgatgtgggatacgcacgccaggagtttccctttgccggtgataatgtctgatgtgggatacgcacagaggagctgtaagggcctagcagagtgtcttatkattgttgttgtttagttactccatcgtgtccgactctttgtaaccccacggactgtagccctcctctctccatgggatttcccaggccaagaatactgga

SEQ ID NO: 38161 - DNA, 201 bp, Bos taurus
agaagggcaagaatgtcttcagtcagtctgcaaagtcgagcacatagtcaagcacctactatgtgccaggcactattttaggccctggggaccctgagcarcagaaaaattttccctcctccctggagctgaccttcagatgaaatgccttctcctgtctccctggaggtgggacctcaggcccaagctgatcaaaaccct

SEQ ID NO: 38162 - DNA, 201 bp, Bos taurus
agtccagtcccagctgccactctgtggccttgtctgtgaaagacggttagaccaggtgctctggtggctttgctttgcgaggtgagcgcactcttaactcrggactggctgacggggcccccagacccaccaggcagcgggacctcccgagagctgagtattacccaggggtaggtggtaactgaacagtcagctgctgcc

SEQ ID NO: 38163 - DNA, 201 bp, Bos taurus
gactgaaggggctccaatcctggctccaccagttactggcagtgtgaccttggcaagtcacttaacgtctctgagcctcagtttcctcatctgtaaaatgrggacgacaataccttctaggaggctcacgtgagacacccgggctcttgaaatgtggccagtgtaaatgtggaagtagcctcataggagtcctgggaagta

SEQ ID NO: 38164 - DNA, 201 bp, Bos taurus
atgtcaggttcctccgggtgcttagcagcctgagtggcctctcaggctcactgcctcctccactggaaggcacaggactgggcattccccacgtcccctcracattagtggtcagcaaggcccccaactcccagcaccagctgcatggattatttgttgactcaaggggagaacagacaaagaagtgaaggtatccgagtg

SEQ ID NO: 38165 - DNA, 201 bp, Bos taurus
gcctatctctgccctctgtagcacacagagccctggggtgccgggtgtacaggctgatcacaccccttgcgggctttttggctggagagatgaggcaaacrggccctgtgggtcttgtccagaggtcggccctgtgccctgagcgtagtccacaggggttgaagttggcacaaccactatgttcaagggacaattattcct

SEQ ID NO: 38166 - DNA, 201 bp, Bos taurus
cgtgtgggccgtggtgaaggctctggggaagagccagctgaagtcaggaaagacctcggtgctcaaaaggagatgctggggctgggctgtggctcaggcckaatggaggagtggtgtctgctgtggggcgggtggggtggtgggtggttagaagcatactcagccttccaagattttggccgctgctgctgctaagttgct

SEQ ID NO: 38167 - DNA, 201 bp, Bos taurus
aatacatgttagaatgctgtattaaaatatctttgggaaaattcacaaacatgctgatcttggttacttgggaggagggcccctgggtggctagtgcaaarggggggacttttcacagtttattgtttaataccttctggattttgaactatgcattgggttggccaaaaagttcattcggatgtttccagatgacgttac

SEQ ID NO: 38168 - DNA, 201 bp, Bos taurus
gggtgtgtgagaaccaggatcatccactgcagatggcctgggccaaccacacttacccctcaggtgtgtggacttgggaagctgctggaggcacagggcgyattggctggagcacccaggaaaatcacagggtcccagctgggtgaccatcatggccttttgcatgtggaagctgtgtgggtgtgaagttggggcatcatt

SEQ ID NO: 38169 - DNA, 201 bp, Bos taurus
ctggctgctacctggaggatgtatcagaggggattgagggcagaagcagggagattcattaggaggtcactgaagtgaccctggtgaggggccacggtggktgaccatcagcacatctgccccaagttccttctcttggggataaagaatgagaagcctttatttttggccaaggcactcagcaggcagccctcagagtgg

SEQ ID NO: 38170 - DNA, 201 bp, Bos taurus
ttttggccactgtctaccctctttctctcccacgtgtcctgacatgaaggagccatgatcctgtcttagaacttgttcttcctctcctgtttggacatatygtcccctctcattggccttggatcttgagccacaaggaacctccaagatagatctaatccagccccagcatcaaggcaaagtgatctgggtctcatttta

SEQ ID NO: 38171 - DNA, 201 bp, Bos taurus
tctgagctcttaatctgagagaagggcaacggccacatcctgagccctcggtacctttatttcacttgataaggggcctgcttcacgctgtttgtgccccrgctgactgtccctgaaggggtggacacagagtggtacccagacatcatgagagggcccagcacttgggagctcaggctctgaagtgcggcagcctgggtt

SEQ ID NO: 38172 - DNA, 201 bp, Bos taurus
ctggccatccccacaacagggcatctggatgctgcttgctcccactttacagatgcagaaactgaggcccagagaggagaatgggctttctctgtggcccyggagggacctgcaagccggatctctggactccaactccaggtccctcctctttgccaaacgtgatctatttgacagcaaaagagcaccgagggtgggcct

SEQ ID NO: 38173 - DNA, 201 bp, Bos taurus
tttgcttctctatccagcagcaaatactgcaacaataccttagggcatgggtgtgggagttttcagtctcccagatgagcacccagccctctgggccccasctggagcagcaggcacaggtctgcacaagttgttaagcctcctcctccccctcaacccacccccactcccaccgggcaggatgctcagcctggggcccag

SEQ ID NO: 38174 - DNA, 201 bp, Bos taurus
gtgggttgccatttccttctgcaggggatcttcctgacccagcgatcacactcacacctcttatgtctcctgcattggccagcagattctttttaccactkcgtcacctggggaacctcagttttcagttcagttgagttcagttgctcagtcgtgcctgactctttgggaccccatcaactgcagcacgcctggcctccc

SEQ ID NO: 38175 - DNA, 201 bp, Bos taurus
gaaccaggattagacttcccagttttacagatgggaaaactgaggctcagaatagcaagccttctttgacctaattccaaagttggccagactctacagcycgtgatcctcctgagtggtctcccggtgtcatttcttccacaagagaacttccaacggccatactcccagatgcctcctgaaccgaaagacccacactgc

SEQ ID NO: 38176 - DNA, 201 bp, Bos taurus
tacttatcatcattcagaagaactctagttcccccttctcttgctcaccaccctcacacacacatgcagtgaattatacccctaggcgagtgggggagtgraatggtggggtcctgcctgggtattaaaaaaaaaaaacctgtaatagaaaactccaccagtcatttttccctcctttttgtatccatgagcaggtgcaca

SEQ ID NO: 38177 - DNA, 201 bp, Bos taurus
tgtgaaatggggatggtggaccctagcacatagtagactcttcttaaatattagctcttgttgttacagcactgaggcctcagtcacctcttttcaatctrttaatatgaaaataaaattttaaatgtgcaaaaagatagccaccggggtccccctgtccctgaggccttccagggtggagggtccccctccatgtactcc

SEQ ID NO: 38178 - DNA, 201 bp, Bos taurus
ccaggttccctcagagcagaaaacttcatcacattcaggtagaagcagagagagtccagactctgtgaagagaagcatctgctaggagaggattaaggcayggccaatggggcagtattcgaacccaggcagccagccgcagagcctgggtttttactccaccatccacagccggagaggggcagggggcttccctgatgg

SEQ ID NO: 38179 - DNA, 201 bp, Bos taurus
aattccagctgtgccattcacacgttgggtgaccttggccaagtcttcctccagcccctcatctggaaagcagagatgaagctagtgcccttttccctggytgctgctggatcgccaaggccagaacacaccagggaaggttgtcagcccctgcagggttaaggccgtgcctcgtcacgtggctggttgcccttcttactg

SEQ ID NO: 38180 - DNA, 201 bp, Bos taurus
aaataaaaagaatgctatggtttgaaactcctactattgtggcaaattaaatctttaaatcattggaaaagctgaagtattactatcacgtatgcagtatrcccaagattacaagggcataaacttaaaagatattaataaaggagggctaattctctgagcacgtgctacttttgaaatcttgggaaattcacacaaagg

SEQ ID NO: 38181 - DNA, 201 bp, Bos taurus
tgccttttgcatctagacagttgtacagttttaactcagaagcacttgtgaatcctgagtatctcacagcctggaattatctagtctctacttaggaggargaacatgggtctcttcctagcttttcttccttcagtaaacacagtgatcaaacaaatgaggaggtttcacttccactagctcaacagcctgtgtgcacga

SEQ ID NO: 38182 - DNA, 201 bp, Bos taurus
aagcccataagccccttgcaactgcttctgcatcccagcactggctgagtgccacaactggccagggtgagcaccacagtatctaataaaccaccctgtcrtaactgactgaatcaggtgtggaaattttgactgaaagacagccaatcagctggataatcaatgacctgttttgtggtctggaatgaaaaaaagagcatc

SEQ ID NO: 38183 - DNA, 201 bp, Bos taurus
agacactttaccgtctgagccaccagggaagtaagtgctcaataaatgctcgttgctgatgtttgcttctttcgacttcttgtttttaacctcatgttctrctccatctgggttaatatacaatgaggtgcaatggacacaaacattcggtgcattgcatctcattgtattgaacatgtttattttaaaaacattgtcagc

SEQ ID NO: 38184 - DNA, 201 bp, Bos taurus
ttgtagtaagacaaggcccagctttcgttgtagtgttcaggactgaactccttccaaaacagacctgttctgtcactctctttcatctcaggcaatagcayttctatccttggggcccttcctgactactgtctctctccccaacccacgaccaatccatcgacaatttctgctgctctaccttcagattatattcagaac

SEQ ID NO: 38185 - DNA, 201 bp, Bos taurus
gggcctggactgtcctgaccatctgctccagggctccaaagccagatgctgagtggcattctgttgtctctagctatgcagcttatcagcctcctggcctycctttcctgggcaacatacctctgcatgggcggctatgataatgtgtaccgtctacaggcacagagataaaggcccagggctggctcaggagggggcagg

SEQ ID NO: 38186 - DNA, 201 bp, Bos taurus
ccagcggagttttttcctgcacgtgtgactgagtccccgacccaggtctgctctgggctcccacagtcttctgtccagggcaggcgcctggctcagggccrgggaagaggtttcagaaactttcctggcacgtctcccctctgctggcatttgtttctggttggcgccaggctgcttccaggccctatgagtcctcatgcc

SEQ ID NO: 38187 - DNA, 201 bp, Bos taurus
agggcccaatctttcccttcatccgtgggagctccccttcaccttcccgggacagcatcaggagtgactcagcagacggctgatcctgctgctctgagccyggcaggcctctgggaactcggccaggagcgtggcagtctgcggctctgcactgggcctctgggaactcggcccagaaagtggcagagtgcggctctgcac

SEQ ID NO: 38188 - DNA, 201 bp, Bos taurus
cttagcgaccccatggatcgcagcacgccaggctgcacacggcgatactcttgcctaaaaaccggtccacatgctatgccaaaagtcggccctctactttygtactcttggcgactgtgagattggctgagtgaatgctaacactctattggctgagtatttgccacaggctacctcatggggagctagccagcctgtggg

SEQ ID NO: 38189 - DNA, 201 bp, Bos taurus
atgagttgtggccttaatcatttgtttaaaatagttttacacatcttttaaattgcaacttgattcttactttgagttttcttaaattgttaaatctgttkgaaaatcaaggccttgttcctagacttcagttcagttcagtcgctcagttgtgtccgactctttgctaccccatgaaccacagcatgccaggcttccctg

SEQ ID NO: 38190 - DNA, 201 bp, Bos taurus
ttcagctcctattttcttcttacttctcacatccttttggttaccatttctgttttgtatctgaaatacttcagaccataatttggtcatggatcagaaaygatgaaaagagacatacttgaaatttaaaaattcttaaatgataagaactcttaaaaccaaactctacttgagaaataggacacagaacccaagtaaaga

SEQ ID NO: 38191 - DNA, 201 bp, Bos taurus
ccaaggcaagttgcttcgcatctctgggccgtggaggcccccaccacctataaaatgaggatttgaaaagtatctctcagctacctcactgggctgctgcyatcatggacataaaaggcaaaggcccttggaaggaaaaaggagcgatgaagcagtctgcttccaagtattggctgtcggggaggcggggtaggggggcgg

SEQ ID NO: 38192 - DNA, 201 bp, Bos taurus
gggcctctgggcagaggaggacggtcaccaaacaagccggcacggctcacggagcctcgcctacgaagggacctttgttgcctgagctggaaaaagggacrccttactcaggacccaggcctcctctcaggcgtcaagagggggctggcacactcactcagaggagcgcacccccttgcccttggctccaggaaagagtca

SEQ ID NO: 38193 - DNA, 201 bp, Bos taurus
accccaggtttctttttcagatttcacagcgagtactgccgtcccggcccatcattggatcccttctggctgctgtctcctgtcgtgttgatcccagccgmttctgcacccacgagggtccaaggccggggaatccccaggctccatcgctcccgtcccccacctcctagggcagccccagccccctgccccggcctctcg

SEQ ID NO: 38194 - DNA, 201 bp, Bos taurus
tccgagggccaccttgcgtgttggctctgctcagtgcatgacccgctccctccacgtttgccctctgagcaagctgctacagaccaggagagtcactgtamgtggccgcctgggtttgagcgagccctgaggatgctgtccctcaggcacagcggtcctgaatgacagtgcaggcatagtggcctgagagccctttgtcag

SEQ ID NO: 38195 - DNA, 201 bp, Bos taurus
ctatagcttgctgggccaccaaatcccccgccggggccgccgccaccgccacctcttccctgccctggcgcgtgtctgggctctcatactctggggacggrggcttcatcaaccgcacatcgtcgctgcctttctccaccctagggagaacccagtgtttgccacacgtgttccaggctcccaggcgggctgcctgcccct

SEQ ID NO: 38196 - DNA, 201 bp, Bos taurus
aaggaagaaggcaggtacccagatgccttacatcagaaggtgggagcatgaaggaaggccctgcccctgctgccggcccccgtgccgggcacgtcaccacygtccagaactgagttctgtcctcactgcctgcctaaaaataggtgatgttgccacttcagaaataaggagccgagcagctggcctgagatcacccggggg

SEQ ID NO: 38197 - DNA, 201 bp, Bos taurus
gcgactgaacaagagggagcccgcaaacaagccagcagagaaccaaaggccatttacaaaagcagcagagtatgtgcccagagccttgtgccaaggcccgmatttcaaaacctaaggggctggaggaagaaggaaagcaggaactcatgctttccaaggacccactaaggtgccaggaagtggccttcccaccttccaccc

SEQ ID NO: 38198 - DNA, 201 bp, Bos taurus
atagttctggggaccgcacaaggctctggagagaaaagggcagagtagtaacagagggggccagggaaggcttggggcccactcacgcccagggatgtgcycgatgtgtgtgattcagcctcaatacaacctcccaggtcagtgctgtggccccccttcacgtcaggaggccaaggcgtggagcatcgccacggctgtgga

SEQ ID NO: 38199 - DNA, 201 bp, Bos taurus
atcctgaaagccaattaaagaaagtgtttcagattggtagagtgatcggttttatcaaatgctccttctaagtcatataattgaggattgagaatttcctrtaacatctaatatgctagaggtccaaattatttgactggcatagacttaagctgtcctgccccaaagatctttcctattatcttctcataatgtttgagt

SEQ ID NO: 38200 - DNA, 201 bp, Bos taurus
gagcaaggcttcggtgtttccagtgctagtgctgttcactggggcctcacgtgtcttgaacccacgctgtgtgctgagcggggcctctgggaggcacctgygccatctcccgcctgtcttgttcatctgagtacctttccctgccccgttcagacctgcaggaggtaccttgtcacctctgctccctcccaggcccacctc

SEQ ID NO: 38201 - DNA, 201 bp, Bos taurus
ggctctgggaggtgccggggtattggcggaacgggctgcccatgacacatcacgtccgggagactcggggacgtggtggggctgcagcaccaccctttgtyagtccccttccctgggcccgttgacacagacagcctggggtgtttttgccaaagatgttccccaggcccttgctttggcttccgctttaattcaaaacac

SEQ ID NO: 38202 - DNA, 201 bp, Bos taurus
tgctgggtgccagtgccattgtgaaggcagagtcaggtataaatgattcagtgcaggtcctgtggcaatgggtgggagttcagatgaggccaaggtgaacractggagaacagtgatgaccatgatagaaatgaactgaacctggaccaacatccccagagctcccctggccgccactccatcaaacggtgcagactgccc

SEQ ID NO: 38203 - DNA, 201 bp, Bos taurus
attttaaaaattaaatttaaatttgattaatccttttggttccacctgtgaaatctgaatcattttgtaatataatcctgtggaagtcatgatgtttttaytgactgatttgaggctagcttagcaaataggtgggatctgaggttctgtggagcagctgagagtagttcctggggtgtaaaaatggttcaacaggtaaag

SEQ ID NO: 38204 - DNA, 201 bp, Bos taurus
gtgtggggaggttttggtgtggcttccttacctgcgtgaagccccagctgctggcttctgagccccctaagggaatgtgggctgcagtgacccatttgttytgttttatgaggcctggactacaaccaacaataaagttctcagggctcatcttcagagccctgctgaggcaggggacaggactacagggggtccgtcctg

SEQ ID NO: 38205 - DNA, 201 bp, Bos taurus
caggtgctttctccccgaggccccctttgtagccacctgaggcagttcttgggtcgaaagcaggagactgactgaggaatggaacactgtgagagcacagrgggccctgaggcagctcaccggacggaaggaggtgctcagaagcctggcctggggagggcgggcctgcagcctgggctctcctggaggggttggggcggg

SEQ ID NO: 38206 - DNA, 201 bp, Bos taurus
atgattgtataatctttttctcccagacatgctataattccatctttgatttctccttgagccacaatctaggagagagagtttcagtcttccagtggccrcattttcacattgctctgcgttgttgtggtttatactttgacgggtggttgctggttgtgtgtaatatcggcctgggatcggctggtgtgcaggatatga

SEQ ID NO: 38207 - DNA, 201 bp, Bos taurus
cggagcgcctctccgagctgctgtcttcattgccctttggtgtgaagggagggagagcctattctggggaaggagtagaggaataaaactgtcaggtggcrggtgtgtctggggccgccccggtctgggaacttaaccggtagcaactcctttctccagttctggcggcttcaagtccagggtcgcgtgtcggcaggcggg

SEQ ID NO: 38208 - DNA, 201 bp, Bos taurus
agcccttcaatgggcttacctgatagttaatgaacgtatgtcattataatgacaagcacaacaggcttatgtgggttttgagggatgggcctgccctggayggaggacaggtgtgtgtccggcaggtggagagaggctcagttagcccagcccagtgctcagggaggttggcctctggcttctgtcgcccggagtcctcca

SEQ ID NO: 38209 - DNA, 201 bp, Bos taurus
tggaggcccagctttcgtgctgagcgcccctctggctctattcaaatcccaggcgtgtggataccatcgcagagtctggctctttctaggactgagaacamgtggtcccaggccctcgcctcccaggccccagtgcagtccccagggcacctggtgggtaggtagaggtggggggggcgggctggggaggctggctcttcc

SEQ ID NO: 38210 - DNA, 201 bp, Bos taurus
agcgtgtggggcgggtgcctgggctagccgtgggcgtcaccgccgggccccccaggtgctggacgcggtgctgcccgtcatgaaccaggcccgcagcggcragcagacagtgttccgggcgcgcttcagctccatcacggacacagacatctgcgctgccatggcccgcctgggtgagcccgaccacaacgaggcgctctc

SEQ ID NO: 38211 - DNA, 201 bp, Bos taurus
aaacctttctctctgtagctctggatctactggacaaaatgttgacgttcaaccctcacaagaggatcgaggtggagcaggctctggcccatccttacctrgagcagtactacgacccgagcgatgaggtaagagtccggcaggggctgcctgcctgggcggagggggagcgcgcacggatccgtcagctcccccaggagc

SEQ ID NO: 38212 - DNA, 201 bp, Bos taurus
tatctgtggtctttaggacggcccttctgacgggtgtgaggagccaccactgcggctccgacgtgcttttctctgttgttccgtctttgtgggaaccgcgygcgtcagcgagtaatcacggccacgggtcttgctgctgccgcccagcctcttgcttctcctttcgtcctctctgagccttaatttaaggtgtgtgtcttg

SEQ ID NO: 38213 - DNA, 201 bp, Bos taurus
actcagctgtgggagcctggttgacgcctttcatggggacctcgtccagcgagttttgctgtgggaaaggcttttaaacccatcttccaatggttccactrggaaatggttatatcggtcaccagagaaaataaacacgcctgtaggctgtcagcttccagactcacccactctccggactctaaaaccatgtaagtggct

SEQ ID NO: 38214 - DNA, 201 bp, Bos taurus
aaggaaagaccagaaagtctaaacagagaaatgcctaagtacgcttcaccaatgcaaaaaaaccatgtcccaccatgaaaacaataactatcagctacttytgcaaaatacagtgaacatagctatacgtggttaaaggctaaaaagagctttaggaaatgactgtgctgatggcttcatgggatgggctgcgccgggtct

SEQ ID NO: 38215 - DNA, 201 bp, Bos taurus
ccacccagagggcatcgtggagcaggaaggggcctccgccagatcccgctgcacagtggggtctgctctgtgtgtttacaggggccctgggccgggccgtraagaagcgttttgtgagttaccttatcttctaaaactggtgcctgtcctgagccctcttgggacacgtacaatcaggccaccaggaaaagtggtaaaatt

SEQ ID NO: 38216 - DNA, 201 bp, Bos taurus
gcactaggatccactcgcgggcactactggctgggaggaggggctgcctttcaagagctgaacctgcaaatccaaacatcagtgagcatgggcctctgagycacctgttctctctctgccagtgaagaacccaggcaggggtctgaggtgagaccaccatgacaccccgcacaggggcaggagcgcagtcagagtggccag

SEQ ID NO: 38217 - DNA, 201 bp, Bos taurus
ccccgcagcctgcagtggggagtgggggcctgcgccatggacggcaccagatctgatcctgacaccggcacgcctgcagagacagggccgcccttcccggrgtctctggaagttctccatcaaacaacagtaggtctgagccacctggcacagggctggggggcgtttgcagtggccccaacttggaagcctgatagctgg

SEQ ID NO: 38218 - DNA, 201 bp, Bos taurus
gggggtgcatcgccccggagcccacccaccgtcccactgcgcagacacttggtgttctgacagcgacaacccagacctgggctttaaagtgacatctcttygaagggattgtggcttaaaaagaaagtacatgtgctcatcacgtgggcacatccattgtcagcaagggtgcccgcgccccaggctgggaggccatggggc

SEQ ID NO: 38219 - DNA, 201 bp, Bos taurus
aagggcccccctgttgtaacccttcggcatgtttggaatatgtgcacttctatttagtgcatcagatcagagagccagcagtataactgcagatttatggyagccaggccttggatatcgcctactatttaaaatgacttgttaccaaaacgttcagagaaaaccatagattaagcgtattgactatgtttcttctttaag

SEQ ID NO: 38220 - DNA, 201 bp, Bos taurus
gcagagcccaaagctcacagggccctccagagcagccctctgaggctgcctctgtcccatctcctgctccccgtccttgaccagaggccccctgccagcarcacagagacactcacagccttgactgctccagcctgcagagacagagcaaactgatggccgtgtgcatcgctctaatgacacttgtaagagagtcatgat

SEQ ID NO: 38221 - DNA, 201 bp, Bos taurus
ccagagttagcaccagccctggggagatccttccccttttagacgggcacaaacctcccaaacgaccaagggaatccggattccaattctagctctgagcstcccccttcctgctggtacttcggtggggcacaaggatcatgccagtctggcaggggtgctgagagtgccactccatggcacagcaacactcaagtgcac

SEQ ID NO: 38222 - DNA, 201 bp, Bos taurus
cgccagcccgccgcaaggggaggcccgcacatcacaacaagcgagacccgcatgcactgcaatgaaggctgcgtgaagtcaaaataaatttctttaaaaaygtatgtcaattgttcatttttaatcctactaaaccctggtccatctactgcattattttggtaaaggttttacagtatgctttgagtagactggcaacaa

SEQ ID NO: 38223 - DNA, 201 bp, Bos taurus
ggtggcaggagccccattgcaccagcccactgcccaccccgagatgtttgcagctcaatgccaggacagagatgatcattttgcaacatttaaagatatcraatcactatgtcgtgcacctggaacttatatagcactgtaggtcaattatataattaaaagtacaataaaatttcggagagaagaggagaagaggtggag

SEQ ID NO: 38224 - DNA, 201 bp, Bos taurus
gacagcaatcaactgttcttttgcatggctcaagtcttacccttagcatttcacagcctgtgcatggcattgggagttgatggtgaaagtactgaccaccrtttatcgtttactaagtgtgtcttgaatgtcagcttacagaatataacattttaaacagctggaagttttttaagaaggtaataaaaatggttttctatt

SEQ ID NO: 38225 - DNA, 201 bp, Bos taurus
catgaaccaacttgggcctggcctgggagattttgcagacgtcacaggtaatcagagacttacaggctcagtaagagagtcagcagaagggataggaaaayttcttagccaactggggttacaggggaaaaatagcctggggctaggatgagcaaagaggaaaacaggtaggcagtccagtctcctataataggagttagg

SEQ ID NO: 38226 - DNA, 201 bp, Bos taurus
gatgtttgaactgttgtactttaaacatagagcctgtattataatcatcttaagaaaacatcatgcacctctaaaatgtcataatacagcttcttaagtaycataagatgtatgtgtgctaagtcgcttcagtcgtgtccagcccgccacattcctctgtccatgggattctccaagctagaatactagagtgggtttcca

SEQ ID NO: 38227 - DNA, 201 bp, Bos taurus
cttgggaggtgctattgacaggccaacagagagttattgattttgcgaaaagccagatacttttgagtaaacatggaacgtgagaggcccccagagaactwgtgccctgagaggctctgggagctgtcacagcaggtgccactttggagtcactgcggagattggtcccgagggtgcagccaccatagctgcactcaggtg

SEQ ID NO: 38228 - DNA, 201 bp, Bos taurus
gagacacagcatggccggccagaggagttgtaagagatgagaacgacttgactgaacactgaattgaggaggagaggattgtgggtgtagggcttgagagraagggcactgtgcagactgtgatatttttgtttctttttaaaattgtatctatttacttatttttaactgtgctggctctttgttgctgtgcacggattt

SEQ ID NO: 38229 - DNA, 201 bp, Bos taurus
agtgactaaacaccaccaccacattcctttgatgccaaggcagtgcattcactttacattccaccactgagattcatttccatgaagttttaaaaatgcayagacaacagatgccatattcttcttctgtagatctggtgagcaaaggctcatagtggcagatacgaggttgccctccctggtttattcacttcagaagcc

SEQ ID NO: 38230 - DNA, 201 bp, Bos taurus
gtgtccttatccatgactccacacaaacccacatccactctgcagcaccaaaatgtttccttcacaggtagctctgctggccttcaatgttgcaagatttytttaaataactttattaagccccaaaggggctttccaaagggaaaacaggagcacaggttaaacaatgcgcggcgcgggctgcatcgcttagagtaagaa

SEQ ID NO: 38231 - DNA, 201 bp, Bos taurus
ccaaacttcacgtgggaccatgcggccagcccttcccccacatcaccagaggctttggtgcagtgtctgttagtaacagtcctcctccttcacacatcacrtcagcatcctctggaagatgagggaggagcgtaggctaaatgtctgggatgagatgctcagaactaacatccaagttgtgttttaaatggcaatttcaga

SEQ ID NO: 38232 - DNA, 201 bp, Bos taurus
actctcaacagagtttggaacaggacctagcagtaccaggaagtggaaacatctcaggaagcaatagagattgcaacaaacttgagttcccagggcacatytacagggctgtaagtccaagtattcaaggcttgagcttttttgccagaccagttctagctatgattttgatctttgtctcaggctatgcacatttgagac

SEQ ID NO: 38233 - DNA, 201 bp, Bos taurus
caattaagtccacaggctgcagctgctgaagcccacgtgtctagagctcgtgttccacaacaagagaagccagcacaataagaaggcctcgaaccccaacyagagaaagcttgccacaactagagaaagcccatactcagcaacgaagaccccgtgcagccaagaataaataaatacaccttcctctgttagaagggccaa

SEQ ID NO: 38234 - DNA, 201 bp, Bos taurus
gtgccgcatggcggcctgggtgtagatcttgctggggaaacaggtgttgaaatccttaactatcctgctgcctggtgctaggccggatgcccaggcctccrtggggtcacattcttctttcctcacacccacctttagcagggcactgctaccatgcatgcgtgagaggttagggttctgaggactcataggactggtcca

SEQ ID NO: 38235 - DNA, 201 bp, Bos taurus
actgcgcttctagtgactaaacaaggggatggagcgcttttccattctgcagctctcacctgaaggaacattgctggcccttaaaggagcaatgtctgctygcaggtttgacttctataaccaaattgggtcagtggcgtgttctcaccctcagggcccccaggaatgacaccagcctgtacccagcttctcatccacaga

SEQ ID NO: 38236 - DNA, 201 bp, Bos taurus
tcctggccagtctgggtcaattgttgcagacactgtggtttggcttctcggagtggctgctgcagaggtcgtgggtcagagttcactgttatagacggtcyggccattgtctgtttgtgtattcaacatctcactacctatttcatgattgttcttcccagaattaaatgagctaaagtcattgcttataaagggcgagac

SEQ ID NO: 38237 - DNA, 201 bp, Bos taurus
ccggtccccggagtgagtgcttccgaggctgagaaatcacttttgcactctccagcctttagctagacctcactaggctgatgtggccagagggaggggtrtgctggggtccctgccaaacggagggcagggcaggcgaagtgcaggatgtggaagccctctggctgatgggggaggcaggccttgaaggatgctgcggga

SEQ ID NO: 38238 - DNA, 201 bp, Bos taurus
aagaggagcgagccacctgcagttggcgtggccagcccacaaaggcctcagtgaccccgcccctgctcgctgcttggcaacactgcctccatctccaggtrtcccccagttgagagtggccaggcagcaggaaggagagaaatggtagattaggccaacctcctgccttcccgggagccctctagaaagccccgcacaagg

SEQ ID NO: 38239 - DNA, 201 bp, Bos taurus
agacacgaaagggatccttcatccatgtgcttgcgatgccctggctctggtgaacccaaccaagaggtagttaaatggccccgcagattgcgagtgactcrgggaatgcctgggtttatgtatggattagcaccctgatagaccctgagtcgcagaagacgaagactaattacctgacaacgctcccctccgctcgcctgg

SEQ ID NO: 38240 - DNA, 201 bp, Bos taurus
tctgtgtccacgttcagtgacttcacagagtgagcttgaaattagccatgctggagcatttacaccacagaaattggccaaagctccccacgagggcccckgcacccaccgagaccttgtgaagaaacaccgtccagcccagccctgccattaacagtcagaaaacaaaggcccagattgcacgcaccaccttcaaaaact

SEQ ID NO: 38241 - DNA, 201 bp, Bos taurus
gtgtttcccgtgaacagctgaacagcgtcgccctgctttctctcaccccccgggcatccccacatgtggctctcattcatcccctccttccctcaggccayacagacgtatggagtagcacctacacactacagacgccgtgggtgccctcctgactgtaaaaccacaccacccaggggccatgggacatcactcggcggc

SEQ ID NO: 38242 - DNA, 201 bp, Bos taurus
taggagaatctggggtgcactcaccctggtcaactctcagcagacctgcgtgctctgccctgatggggtcccgggagatgtgcatgctcccaccctaatgyaggtcttagcatttcatctcacagctctcaagaccacatctcagagatgattatgggtggggctggggtggggcgaggcaggggcgggcttccaacagca

SEQ ID NO: 38243 - DNA, 201 bp, Bos taurus
gctattcaggtcatcaggagttcaaatttaaggtgaggatcttctgcactttgagtaaggactgaacttaactgattctctgcccagcccttgccatggayggcaaagcccagcttagattacgctggccccgtccccagcgtggaaacctcccttccaggttgacactcctctgaaagcgatcctctgtggttccattcg

SEQ ID NO: 38244 - DNA, 201 bp, Bos taurus
ctgcttgagaaactaccctgaaatgagaactctctggcttcacccaagacctcctgagtcacagactctggggctgggacccaacaagtggtgctttaggrggccttaccgagattctcaggtgcaaatgagtgtgagaagggctcctccccaaggccttctcacgcccctgtctttcagccaggtttccccgaatggtcg

SEQ ID NO: 38245 - DNA, 201 bp, Bos taurus
tggcagctctagaagtggaggagggccgtggacgagctcgcctaacactcttgttctggggagcctgggaggatagattccattctgcaagcaggaggccrgggagttcgctcatggtgcaggagacagcaggtcatttacactgtgtttgcgatcaggggtcacagagaggggccaggagttgaattccaagaatggcac

SEQ ID NO: 38246 - DNA, 201 bp, Bos taurus
cccatagtaaatttttgctattgggcccccggctcttgtttctgacaggctggagtgtgactggtccagaacattccacagggccacatgaatgcagggtyggaatgtcagcgtgctgttatctgatttgcgtcttttcagttcgtttcctgttggcccgaagaatgttctcaaaattacgtggactctcagatggtgttc

SEQ ID NO: 38247 - DNA, 201 bp, Bos taurus
agttagaattttattctcatcatcgttggaaaagacgcaaaggtcttaaaacgtacagcaaagtgcttggcactgatgctatgaggatccctggcccctgygctggggctgaagcttgcgaggacggtagcccaggcaaaacgtgctgactaatgaatgacttgctttggagagggactgtcgagaagatgctggaattct

SEQ ID NO: 38248 - DNA, 201 bp, Bos taurus
catcctgtgtcctttcctgcccctccccaatctagtctccctacttcatgcagctggtgtaatccttttaaaatataactgggttcatattacttccttaytttaagcccttcatttgttctaatacatgggaaacagtccagacatcttccaaagcctcccagatcctgtgtgacgtggcccccgtcctcccctcgttct

SEQ ID NO: 38249 - DNA, 201 bp, Bos taurus
ggtgccccccacattctccaacccaggacagggcacccatctatggcgaatgagcacccagtggattcttcacttcaaacaaacacaaatggatgaggctytccaggccaaaaccggtgcacggtgctttatttatttaattggatttaatcttcattctgcttagtgaatactagaaggaaacaattaagcaaaagggag

SEQ ID NO: 38250 - DNA, 201 bp, Bos taurus
aggcccaggagctggggtctgcagctgggggtgccgccagctcacaacagccttcagggagggggccaggagagcgaggaccccgatcatggcctcctccrtcttcctcctctcttgctggtgctccccatgggctaaaccctactgagacaaacagtaaaggattttgtcgtaaatcccactctccagggcagggggcca

SEQ ID NO: 38251 - DNA, 201 bp, Bos taurus
atcatcccaccagccgaacttcctgcaaggatgggaaggttctacgtcaatgctgccgacaatggtagcctctgaccacgcatgcctatgggctagaagcrtggccagtctaactgagggatctgtactctcaagtttcaattttatttaatagcaaataattttaatttaaaaagcccacatgaggcaagcagctggtgt

SEQ ID NO: 38252 - DNA, 201 bp, Bos taurus
gctctcagtgtgtgtgaatgtgtgtgggtgtatgtgagttagtgtttgtgcatgtgtgtaagtgtgtgggtatgtgtttgagtgtgccttcgtggccaccrtgagaatgtgtgagttttttaatggaatggtggtagcacagagtaaagggctgtggagcagcaggagatgggttttgtgtctctgttctgtgatgtcctg

SEQ ID NO: 38253 - DNA, 201 bp, Bos taurus
gccacccacctaaaggaagggtctctcccgatgtagctgcaggctttgggtgcagaagcatcctgccctcggcgccagtggctgtagctcacacatgaggygtccatccagatcctgggccctgggatgggaacacgaccaccaggccttgccccagcgccactccttgtgtgcagtgggtgcttaatcagtgctgacgga

SEQ ID NO: 38254 - DNA, 201 bp, Bos taurus
ctgattagtgaaaagtacagcgtgaaaactgagtcagagaagtgcctagaaaaacagaattgccctatgatccagaaatcctacttctgggcatctacccrtaaagaaaaacagggattcagagagatgtgtgtccatctgtgttcatagcagcattgttcccaatagtcaaaaggtggaaagaacccaaacgtccattat

SEQ ID NO: 38255 - DNA, 201 bp, Bos taurus
aaggcctcggcgtgaggcgccgggagcagggaggaggcgccggccagcctctgccacgggctgaacgtgcattccctccaggaagcccctctcggggaccygttcctgcctgtgactgctgggcctccttcacccagtccccttgctgtcacttgccccctggccagtccgcctagccccatgcctggtggtgcttcctgt

SEQ ID NO: 38256 - DNA, 201 bp, Bos taurus
caggccagctgctccaccatcgccctgcagtctagaaagttcttggaactcattacacgcagtcagaactttttaggacttgaagtgaagctcacataacrtgcaattagccatttggtggccttttgtaccgtcacggtgtcttagacaccccgtttatctggctccacagcagtctcgtcacctccaaaggcaccctgc

SEQ ID NO: 38257 - DNA, 201 bp, Bos taurus
cttgctctcacactcgccagctgtgtgagtttcctgtgacagagaaccacaaactgggtggcatcagcacaagtgtgccatctctcgggtgtcagggtgcrggcaggtgccttcctggcctcttgcagcttctgggggctgccgtgctgcttggcgtccctctgctggtgggagcctttctcctgtccctgctcccgtcct

SEQ ID NO: 38258 - DNA, 201 bp, Bos taurus
tgtcccttgcattgcaaggtggattcctaaccactggacccccaggggagccctggatgatgttcatgttatgtctagaccatgttttgcttatctcctcrttcatcagcggccacttgggttgcttctacatcttggctaactgtgaataatactgctaatgctgctgtgcaagtatctgttcttaatcccgttttgact

SEQ ID NO: 38259 - DNA, 201 bp, Bos taurus
cacacagtgcctgacaccctgttcctcctggggggctcttagcatcattcctggggtgctaacagacagtgggcacccctctcccggcctgcgttccatgygatagctgctttttaggaataatcctcaggtggagcaaccagggggtaaaggaatatttcctgacacacgattttcttttcctctttgagcagacctggc

SEQ ID NO: 38260 - DNA, 201 bp, Bos taurus
gattcctcagcttaggaaagctcattcattttgtacccatgaattcccagaagagttaacccattttatggcatatctggccatcttttggcctacccccrtcatttcaactagtccaagaaggcaaaaccagagaagggtggggattgagagaggagagatgggagaagcatttaccactggccaccccgtaattgggat

SEQ ID NO: 38261 - DNA, 201 bp, Bos taurus
agcggtgtctccgtttccctttcctctcgggtcttgcttgtgtcaatcagaagaaaagtggcatcagtttctagtgaacctggccagcacctttcagcccygtccacgtgaagggctgcaggtagcaacgcgacttgggcggtggcaggatgtctgtggagctggagtcatccctcgggaggggcggagctcactgccccg

SEQ ID NO: 38262 - DNA, 201 bp, Bos taurus
ggcagtgctaactctgttgtgtgtttcttttttaaacactggaagtgttggtctggccggtacaaatgtaaaagcaggcctgcctacagagaacttatacygatccttctccaactcctcctaaagactgaagaggaaggaacactcccaaagacattctatgaagccactatggccctgataccaaaaccaaagactcca

SEQ ID NO: 38263 - DNA, 201 bp, Bos taurus
tcatttctaatgcattcctatcatctttcaaatgtattttaaagagactgacctcatcagagaggtttctggtcagccacagtttgtcttgtggttagggrcccttcaatccgatttttgtttctagtgtttctgtgtatccagtaccaaacagttagaattgatgtaaataatgattcaaagaccatgaatcatcaaaga

SEQ ID NO: 38264 - DNA, 201 bp, Bos taurus
ggcccaccttaaatcatggtctcatctatcagtcctcagctaatctgcagagatcctatttctaaacaagatcacattcacaagtgttgaggggttaggayttggccatatcttctgcaggaacactatttatgccactacagtgagtaatggagaaggaaatggcaacccagttcagtattcttgcctggagaatccccg

SEQ ID NO: 38265 - DNA, 201 bp, Bos taurus
ttccttctctccagccctgctgaagatggccaagctgtctgctccaggtctcagatttgacagcagagggtcacaggcgtgtgtagcttggcccacatgtrttttgattttggaggtgggggaagagttgtcaccagttaaatctgagaaaatcacatacagttttggaatcctaacttctcctgcaaaatcaggaactat

SEQ ID NO: 38266 - DNA, 201 bp, Bos taurus
gtgatgagaagagatggaagatcagagcaccttggtacctctcgttaccaagtaaaacatgcagggagctgggccaggcccttccgatcgctgtgtgcccyctacgggctcctgccggatggcagggaagccagcacagccctttacctggacttggccgttgttttcctgatgcaggcgctccccaaggctgtcggggcg

SEQ ID NO: 38267 - DNA, 201 bp, Bos taurus
cccatgcaggaatacctaaactcaccccgataaagcttttgcgagaatcaaagtcagtagtacatgcaggcagttttgcacagtgcctgacacaattaatrttagttgctagttcagtgatagtgtcatgctgcaaaagctggcccaccctttcgaaaaaggaaccaagtgatgggcccgaggaagtggtggtgctgagtt

SEQ ID NO: 38268 - DNA, 201 bp, Bos taurus
tttctataaaaggaaaaaagccctgccagggactcctatcaaactgcagttgaaaaacaaagttaggtctgcccggccaggaggttgcaaacttgtatttrcagcaatatttgggaagactatttggttccaggtgtttccaaagttgttcacggcccagacggtgctggtccttgctgctcttttcacgcacatgctgcc

SEQ ID NO: 38269 - DNA, 201 bp, Bos taurus
aatgaatactttgctgggtaaagtattactagttgcaggcttcccccccccgccccacccaccccgccccccgccccgaccctgcggcctttcatcacttkgactaagttgtgccaatactctctggcctgaaaagttcctgctgaaaagttaactgaacaaattattggagttcccttgtaggtaactagttgttttctc

SEQ ID NO: 38270 - DNA, 201 bp, Bos taurus
tcactgacaagaactgtccgcttgatgtgatgtcaaagaattgttttcaccttcttcacttcacaaggaaaatatacactagctttcatttcaataataartactgtcgctacgagaaagtgaaaatcagaaacaaagagtgatgggcaccagtgttttcatttggttgatttctgctctctcctagggaactcctttgtg

SEQ ID NO: 38271 - DNA, 201 bp, Bos taurus
gtctgtcagtgatagaagtttattagcatttactcaccttgcattagtaatacagcacggtacgttttccattttcattagcagtgtttgatagaatcatyagaaaggaagtaaattctctggttcaacaaaataaatgcagcttttgctttgtgacaggtaatataaaagctttcttttgtctctgtgtgtgtgtgggag

SEQ ID NO: 38272 - DNA, 201 bp, Bos taurus
aggacaagacttttgttttctttgtcttagtagccccagaaccttggcatcctcatcacctcacagtgaatctgcaggtagcaagtggccacagatgaccrctcaactgacctaacttaacttaaagctttatttccaactgtaccagttattcatttgttggccatgccactgattttttttttaaccaagtaagaagaa

SEQ ID NO: 38273 - DNA, 201 bp, Bos taurus
ttcccagatgtggctgcagctgcccccaccacaggcagctgattgagaagcaggaaggaaacccatctggcaaatggggtgtggtgcttggagcatagcargaggccatggccagcagccccagcagaccaagtcagcaggcgtgattcccagctggagaggagcaggtgactggcgaggggctccaaggccagcaggatt

SEQ ID NO: 38274 - DNA, 201 bp, Bos taurus
ccatgctttacctgagtgcctcaatcttctggtgacttggaagaaatggctgagcatcaggctccagcaaatcccaagtgcccatccctggaccagcaaaktgactagcatcagaagcccatgggaggtgctgaaattacagaggcttaagccccacctccagtgttgttgcctggagaatcccagggacggggagcctgg

SEQ ID NO: 38275 - DNA, 201 bp, Bos taurus
ccaggaggaactccgtgggcagccccagctacacgaatgttcttctttacgtggagtctgacttttgcctcccctagttggtcctagatgacttaaccccmaacttctcggccccatggggcctcttctgtgccccaggccttcagtgtttaaaggtggccctcacttcattctgaaaccctttctgagccaccaactcca

SEQ ID NO: 38276 - DNA, 201 bp, Bos taurus
accataaagggtttgcacgttgcctccaggctctgtagctgtcgtttccaaaggctgaagaatggtcctctctgagcactggccacgctggctggaagtcrcctagtttttgctctgaacatgagcgcttggtgggtgcctccttgtctgtcatggccagggtttgtctgttgcttcaggtttccgcttaggattgggatt

SEQ ID NO: 38277 - DNA, 201 bp, Bos taurus
cggccctggattaacacgggtcccaaccgctggacacggagtagccacatgaccccacagctccaccccgggggtgtacgaggccccaaagaaccgacacrgtgaagcagggtcctgtgcccacgtgttcacacttgagccagaaggcggaacacacaagtgtgcgtagtgggtgagtggactcctgagtgcggcccgtct

SEQ ID NO: 38278 - DNA, 201 bp, Bos taurus
gccctggagcagaagcacagcagctttgaagtctggggctaggggtggtggaggaccacagcagcctcccgccccacaccctgtggccggggcctccctgytcccccagcagtttcaggattcagaactccagaccattctccccagtgcgctgggaagctgggtcgacattccgggccaggcaggagcagacactgaagc

SEQ ID NO: 38279 - DNA, 201 bp, Bos taurus
ggaaggaatcactgccttggtgatctggtggggaagcttatgggggttggaagggcaggatttcctcctagaccctgtaaccatgggccatatcctttgckccttagagagcatgcacttgcgccctctgtatttttaagggagctattttcctgtctttctggaggaggaaagtggttggcggtggctgtcagacccttg

SEQ ID NO: 38280 - DNA, 201 bp, Bos taurus
aacgtgctcccagcatcttagctgacctcacgtggctccccaggagaatcatctgggtgctcaggaaagttcagcttcccggcccgctcagtgactcaggrtagggaggggtctggtttatcgcccatctccaccccatctccccggctccagctgcatctcacgattgggcaagtttgggaaacagcccaagctttgagg

SEQ ID NO: 38281 - DNA, 201 bp, Bos taurus
ggtgaggggccagtggggctagttaattcaagatgggatcaaggacctggtccttttatttctttactctgccatcctcagcttgctggcttcgttcttaktctggattccctcatggccccaggatggctgccacagctctagacatcacaaccagacatgataaagatgaaaaagtccaacagaagaggccatgtgtgt

SEQ ID NO: 38282 - DNA, 201 bp, Bos taurus
atcaaggcattggggaagttcggttcctctgctaaaacagcttaggtcgagtgccttttagcaggctgatgagaacctcatcagctgacgatcaggcctcycggactggtctctcgaccttgaacgtgtggttcctgtgccctcactgtggactggactctgcaggccccttcctattttggagtctgttgtgtcagtctc

SEQ ID NO: 38283 - DNA, 201 bp, Bos taurus
cacacagtcaccgaggctgcccagccacgcctcagcaggacgacgcagggcgagggccaggctccgagcccgaggggacaaggcctgggcagccccactgmccgtgtgggtcagcggcagagaggctggcgaacaggtgactcctgctgctggcgtccacgctggcccccgacgcggctcagggctctcgcccgatggttc

SEQ ID NO: 38284 - DNA, 201 bp, Bos taurus
tagaaaaataggaatctgtaatggtagagcatggggccttcagggaggagtgtgggagcagagcttgtatttgtgggttcggatccggtgccttgaacttyagggttagccctggcgaggaggcctatgtgcctcccgtcacagcctgtgagcagcgctggctctcaggttcatgcaggtctggtccaagtactaggctgt

SEQ ID NO: 38285 - DNA, 201 bp, Bos taurus
ccgccgggagcgggagcccaccagaccgagccgggggcccggcggttctcaccccgatgaggtagatcttgtccaggctgaagttcgggatgatggtgacmagctccttctcggccagaaactccacctccgctgcatccatggcgtcgccaccggccgacccagggctcgccgccgccgcctcaggtccctcagtttccg

SEQ ID NO: 38286 - DNA, 201 bp, Bos taurus
catcatccccgccctcccacttacctttggaccaattggggcgccttctggctcagcgcttgcctctgaccccgccacaccacgaatcttcagtgaatggrtcctccccaaggccggctcctgtcccattgagtgtctgctccagaatcttcattcgctcctgtatgacctatgacatctaaacttggcgtggcccatgag

SEQ ID NO: 38287 - DNA, 201 bp, Bos taurus
ttgaccctttgacttccccttttgccaccagctggagaaaattctctgccttttaagggcgcgtgtgatttgattaggctcacccagatcatctccctttygattcactcaaggccaacagatgagtaaccttaattacacctgccgaactccttctgccccataaaataacaaagtcagggtgtggtgtctcatcccttc

SEQ ID NO: 38288 - DNA, 201 bp, Bos taurus
cctcaaggagctaggtccttcctgtcaccttgtcttgcccaccatgacgttggctttgtcctcatgctggttacaagatggcggccgtggttccaggcatyacggaagaagagagaccatctctcccatggtgctctcctggaagtcaggagattctcccagaaggcccctggctgtcactgtcttccagttcattggcca

SEQ ID NO: 38289 - DNA, 201 bp, Bos taurus
gagcacatggacagcatgcttttcagaccagatgccacaggtagagccgggaaatggctcatacacagaggcagcaaggtcaccatcatctaattccctgmgcacagcgataggcgtttacaccggctgtagatacctggagcacccggtaagaccggccagtgtgaccctgggcagctcgcgatttctccaagaaggagc

SEQ ID NO: 38290 - DNA, 201 bp, Bos taurus
tgctgccccacatgcagccatagagtgggtctcccctcttccagggccacgtggggtttcccaccagtgtctgccttctgttttccagcgcagagtcctcractcaatcgtgcacccagtggcccagggccttattgaagggctgggggcgggggcagtctgcatttctagcctgttcctgggggactctactgctgctgg

SEQ ID NO: 38291 - DNA, 201 bp, Bos taurus
cttctagaaacattcagacagcagatgaagttgctttgttatccataatagtgataataagtcatggtgataataagatatcatcaccaccatcaccatcygatcgttggatctgcccagcacacctgtgctaggaacttctactcggcagacaggaatctctgaagccctgagagtaacctatcctgagttctgcctcct

SEQ ID NO: 38292 - DNA, 201 bp, Bos taurus
ttgcttgctctaggccaggctttgggctacgcaccaagcctgtcaccaacaaagcctcgcttggcaagtgaagaaatgggagctcagaaagatgaaatcaytggcctcatccagctggttggacacaaacactgaccccagaactggtggaatagagcaggcctcagcctgtgacaggtgagtagatggggagatgggtgc

SEQ ID NO: 38293 - DNA, 201 bp, Bos taurus
aacacagcacttgaacttagggacctgaggaattcacttatttacatttgttatgtgtattaaggcaagcgtttgttcagccttcatatgcatgaggcccygcagtgccatgactggtgcaagagtgactcagtccacagcagcacggtagggcaagactttaaaagggaagggaagggcccgctgagcagagccacacac

SEQ ID NO: 38294 - DNA, 201 bp, Bos taurus
tcctcagatggcagagaaccgagcagagccgtggcaatcagccccctagaagggccctaattccattcatgggggctctaccctttaggtttcatttaatyctaatcgcctcccaaaggttctacctcctaataccatcacattatgcgtagagcttcactataggaacttctggcaggacacgaacatctggtcactaac

SEQ ID NO: 38295 - DNA, 201 bp, Bos taurus
tcagctcttcgcatcagatcagcttatttaataactgaagaccagcttatttaatcagaacatgtataaatccctagttaacctgctgtttttctaataargtctaatttgttcttcgtggaaaatgtcagggatcttatgtataggtatgtttagccatttaaagtttgctgtaagcaaacttaagtgatgacactcata

SEQ ID NO: 38296 - DNA, 201 bp, Bos taurus
acagcaacaaggcaaaagcaacagataacttacaggcaaactcccgtaaggatcagttgacttctcagcagaaactctgctggccagaaggcaactgcacraaatatttaaagtaatgaaagggaaaaacctacaagcaagaatattctacactgaaaggccttcattcagactcgatggagaaatcaaaagctttacaga

SEQ ID NO: 38297 - DNA, 201 bp, Bos taurus
atttctgggaaagtatttctttgtcttacaaaagggaaaagataatgttatcataagtatgagtacctatttccttgttttatttgaaaaaattcctgatytgtttgatttcaaaccgccctctctccctctcttttactgtaccagtacagcctaagtttagagtaggttttttgatatctattaaaaagtattttatat

SEQ ID NO: 38298 - DNA, 201 bp, Bos taurus
taaaactggcaatttttgagtcattagctagaaagaatttaaagtccctgcttcctattggaattcagggaggagcctgtctttttgagatgacaggggtrtgtataatggttattctcacagaacagaaacaaatatagagggtctaacctagtactctcaaacttcccttgattttcacacgtagcaaagggacttaag

SEQ ID NO: 38299 - DNA, 201 bp, Bos taurus
ggtcactcagtaattttaaatatatttgtctctgaaggttgctctcaccatattatatcattttggttttattttctctttggagggcccaagcctgagcmccatttctgttattgttgagctcaagtttgcactgtgtgttgaatgtggtctgtactgtaagaggcctgggaagtgcagagtggagcccctgccttaaca

SEQ ID NO: 38300 - DNA, 201 bp, Bos taurus
aaaggttgatatttataagatgacagtttcatatttttaatgaaatttgggtcttcccatttttcagcactattagatatctgagaggccaaagaagtatrcattttattacaaagagaagaatatagcaaaaaatcagaggtatgatgatcctttgatctgtgagcataaaataatgccatttcattgggccttaatcaa

SEQ ID NO: 38301 - DNA, 201 bp, Bos taurus
ccaggagttggtgatggacagggaggcctggtgtgctgcagtccgtggggttgcaaagagttggacatgcctgagcaactgaactgaacacagaagccacrtttttggcctcatgttcttcaccgtgagtgtgctttccagttcactgcatccctctcagcccttccttttccacttgacctgcttcacgcattcattcat

SEQ ID NO: 38302 - DNA, 201 bp, Bos taurus
aagaaacaaaaagagaatggtttgttatttcaaaaagtaaaaacataaaagaagccagagtatgttgaaaaagaagagaatgttttggctttttgacttgygtaattacttcaaaatatttcaaatgattacttggattcatcttttctatatgagcttgagaaaaacatgcaaaagtactactactctctcttgctcccc

SEQ ID NO: 38303 - DNA, 201 bp, Bos taurus
aatataatttgattaagacattttacatgcctggtagtggtggttcatttgtagaaatgatttcagatctgaggaaaacagctacattgaaagagtttctrggcagtcgaaaaggacaatgtgaacaaaacttaattaggagtacaggctaatggaatcgagagggaggcaggatgaattcattacattaataataacctg

SEQ ID NO: 38304 - DNA, 201 bp, Bos taurus
gtgggggcaggtggtgatagatgaataggaagaactcagaggatttttagggcagtgagaatactctgtgtatcacgatgacagcatatgttgtttgctcragcccatacaatatacaacaccaagagtgaatcctaaagtgaactatggactttgggttgttacgatatgttcatctttaataaaaatcatatagaataa

SEQ ID NO: 38305 - DNA, 201 bp, Bos taurus
ctactggctattgccagcagggctgcgaacgtggaccccggcttcctctgcaggacctcaggcttgtcaaactccaccacctgggaggcagagagagaagrggagggaagcagggtgcagctgagctcagtcctgagggatccgaaggcctgggcgccatcctcccagcggcctgggggtgtcccctcaccttcccgttgc

SEQ ID NO: 38306 - DNA, 201 bp, Bos taurus
ccccctgctgaggcatccttttgggtgcagaggggctccttcctgctccttgttgaaccctgtggcagacacacatgagtgctgtgctcacatggccaggyctgggtgcagactcttctgagggtgcacaggccatgccggtggctgtgtggtgcgcatgcccacagacagccgccccaggccttaagtgggcagctgggg

SEQ ID NO: 38307 - DNA, 201 bp, Bos taurus
gatggctgatagcaggctgctcttgccactccctgtgttgccacagacccctagcatggtaccctgcaaagccaaggagaacagacaggcgttgggacagrtgacttgcccaggacaggtctattgtctgttatgcaaaatgacaaacagaaaacagctacacgcaccccaaggcccctcagacaaagctcaagaggagct

SEQ ID NO: 38308 - DNA, 201 bp, Bos taurus
ctgcgtgtggactgaatccctgggtctaatcctgcactcccagttcctggtccccgctgaaggtttagaagcctctctgggccatcatgcctcaagacacytgcctcacacatctttggggggctttctcttctgggttccaagccagaacttggccaactaaacagaaacatgactcctctgcctctgggaaccctaaac

SEQ ID NO: 38309 - DNA, 201 bp, Bos taurus
ctgaagaagctgagagaactagacttcatttctcctgttcctctcccttcccttccctggggagttgggtaaagctttctgggggcgagttctcagagctyctggagccccttgctggccctggccatctgctcgactgctgaatccctccagcccagcgcctgatcatctctgttccagaaactgggaagctccttccca

SEQ ID NO: 38310 - DNA, 201 bp, Bos taurus
tgaaaatcctttgaattgcccataagttacagtgcatattgttttgtggcaatcaaaattccaaacatcatgctttgccaaaatcaaattttggcccctcrtatccctgtcccttctccctgttagaccattaatcaacggcattttgcccatccaaaaatgacactaatacctttggccccgtgctggagtaccttataa

SEQ ID NO: 38311 - DNA, 201 bp, Bos taurus
aaggaggcctatgcctatttttggaggaagcctgctgtttctacaccaataaattaggcgttgtaaaggaaacaggaagaagtctgataaacagggcctcragaatacaccaatacctcagtaattcatgggaaaactggttaagcaattggaattggatgccttggttcataccttttctaggccctctccttctactta

SEQ ID NO: 38312 - DNA, 201 bp, Bos taurus
tgtcagacactgaaaactagcttcaaattaagaaagcgtctaaggaaaataaaaagcacattcttaattaaaatcacacacttgtaattcttcaggtccakgactatcacaatgtttttcacaatggagaaaaagtgaatctctaactcaaaaataaactccacatctcttgctttacacaaaaatttaaaaaagagcatg

SEQ ID NO: 38313 - DNA, 201 bp, Bos taurus
aatcagtcctaacagtaaggcttggctaggagtccagagcagaactccagctcagggcccgccatgctgaagacagacccggccctgggagggtagccccyggctcctggctctgaactaagctgcccttcgtcttagggaaatattcaagtgacctctgctgccaggcttcacccagcttcagggatgctgttgccggcc

SEQ ID NO: 38314 - DNA, 201 bp, Bos taurus
gagtatctcgaaatctttgaacccccgtaactgagcaatcaatatgctcagaaggtcccgccaacctagcatcagtaactgaaggtaacagctgggagagyggcatcggtggagaaaggggtggacagccgggcttagactgaggtgagctacaacacctcgagcggttttcacaggcagacttcatactatttggaagca

SEQ ID NO: 38315 - DNA, 201 bp, Bos taurus
ttgtgatctgagatgagagggcagcagcggctgaatcatgaactcctggggtacttgaactgattctctcgagcaccaccctccgtccaaagacccggccytgcaagaggaaatggatggaagagaattgagccaggaggtcagaactgctttgcttgcaaaggggagacgcccccaggctcgtgttggagcatccattgc

SEQ ID NO: 38316 - DNA, 201 bp, Bos taurus
cgcttcagcttcgcagcgggttggggtctgcgggttgtaggtgccagttgcgttccctgcggggtgctgctgagtggccgggctcacagacagggcttgcrtttgtctaacgcgtaaacgggggaaccaaattcatttcacagctgagggtgctcaccttggaaaaggccaaggagtttgggaaaagtgaagccccttcag

SEQ ID NO: 38317 - DNA, 201 bp, Bos taurus
gaactctgatctgaagagcctagcccacagtgacctgacggggagagaggtgggggagtggggaagataatacactaacttcttcctccttctaccccaamatctccactggcagcccctatcagccaaacaatatgaagacaagaaatgcagttcttacaggtcacatgagacatggaacagagcagggaagggagggag

SEQ ID NO: 38318 - DNA, 201 bp, Bos taurus
aatcccaatagcaacccttttggcagcctgtcattcctctgtcaggaaggttctctgggacagagactgtacatcactcctcttatatgtccaaagaaatrtcaactagaacaaaccaggtcacacaatgtatatctggaaaatcagactgtttttaaagagagaggtagatttcaactcaaactagggacaggctttcca

SEQ ID NO: 38319 - DNA, 201 bp, Bos taurus
tggccattagatttctgctcacagagcagcacccacaggagtctgggtcaccagtcagggcagtccccacaccctgggcctggagcagatgagtgcagatmacccagccccccagccccagccaggctccagcactggttggaggaggaggggccattccagacgatgtgactcagagaagacaagggctggagggggtgc

SEQ ID NO: 38320 - DNA, 201 bp, Bos taurus
gccactgctggcgccactggcagggaggtgggctttgggaaaggaccacccgccaggggtgcccctggaagacagggatgtttgtaaaggtgttcactgcrggatcagacgggggcctgggactctgggattttgctgggggtgggagtagtggggagagagtgagagagaaggagggctggagaggctgaagggggaatc

SEQ ID NO: 38321 - DNA, 201 bp, Bos taurus
ctggccgcccaggtgtcagtggccactgcccttctccctacaactctgtcactccttccacaggggcacaaccccacaagagatgacctttctaaaacctscctccaggcctcctacttgtcactccactggggctcctcaaatcccatccccaggagcccaaggactttcccaccctctgcacacctactcttccccctg

SEQ ID NO: 38322 - DNA, 201 bp, Bos taurus
tgaaaagggccctgtgagatgatctagtccaaccacccggctggaaagatgggggaactgatgtctggatgggaatagacttgcccaaggttatattcccragtaatgacagagctggcctgaaaccaaggctcccaattccgacttaggtagtgaagaaatgttcgttggggtgggggtgggggtggggggatgggggag

SEQ ID NO: 38323 - DNA, 201 bp, Bos taurus
tcctgtggattttaaaatctcctgtggatttcatgagatgaaatcatatcaagaagttgtttattaagatatattataaagtataccctttggcctgatcktactccatgagtcacactgaagagtcgagtcgcattttgccatttaactttattccggagatgtttctcaaaagtaaatttgtcttcagtggaaggccaa

SEQ ID NO: 38324 - DNA, 201 bp, Bos taurus
agtcttcaaagggcttgtagcaagttaggcctggagtggggactagggcctggccttctggtcttcctgtccagttttggcctggttctggtggagtctcrgtgcccattaggagcctgatcccaccccccaggcagtctcaagcgggcccgttaaatccccctcaagagtgaaacatattgcctgtccacctacctgccc

SEQ ID NO: 38325 - DNA, 201 bp, Bos taurus
catggccaaaggcacagagctgggactcgaacccaggcctcctccccgccgggcacagatcacctggggaaggtgtggcgtagcaggtgctgcctgttctkcgggaggcctttttgcctggtctcaccatcttatgccttagtgccaacccctacgaagccgccctgcctgctttctccagctttctgccgggctcagttt

SEQ ID NO: 38326 - DNA, 201 bp, Bos taurus
taagagaatgctctgcaactttactgcatcgtcaaaaagttcacaggagagaatgtgtgaataaagactaaaccttcttagcagtagtaaatataaagttyagtagaatagtgtgtgaaaatttcatatttaataaaacagttcatcttctgagatttatgaattattagatatttaaaacgagcatgtgaatatgggaag

SEQ ID NO: 38327 - DNA, 201 bp, Bos taurus
accatctcggggacaggaagtgactggctctctctcctgtgtctccttgagggaaatagaccatcggctagaaagacccctagcccatcccacaccccttyttgggcagaactgagagtaggccggctcaacaccagttatcggtgagagaaacagaattaccatgatggatttagattggttgatttgttctgaagctga

SEQ ID NO: 38328 - DNA, 201 bp, Bos taurus
ctcagccagtcttggtaaagccattatcccctttgccagtgattggttcaggataagtcacatgaccctattctggccaataagacttgaagggaaatctkttgaggggctgtaagatgtctgggtggtagccatcttgccaccagcttgaggatcacagagcagacatgggggagaacccgggccctagaggaggaagtc

SEQ ID NO: 38329 - DNA, 201 bp, Bos taurus
tggaaacagtgccagcgattaggtagggccttcctaaggattccagtgttctttagtagagactctgggtccccaattccaaagccctccaccccaccgarcgtatgacattagtaccctggccaggcacagggagggtgtccacttttctggggtgctctgtccttgtggcatttctcagaagcttagaggctggcactt

SEQ ID NO: 38330 - DNA, 201 bp, Bos taurus
tggcatcgagagcgcggggttgtaatcttaccatcggtgccttgggggtgtatcggttgatcggttttggagtgtgtggctcccgtccaggaagagcagtyggggttctggcctcgttaatggcgtgttatgctttttctttcagtttccccctttccagggtgagaatgcttttacacaacaacctggagttctttagtt

SEQ ID NO: 38331 - DNA, 201 bp, Bos taurus
atgaaactgctgagctttgaagtcatgcattagcaaacttttcaaaagcctatttggaagaggtgctaatggcaggcatttggcagggccccaggaggccragaaggtccttccttcagttagactggatctttgtttctctgagtcccgacaggtggtgctccctcagggccgagggactgatatcttcatcctttccat

SEQ ID NO: 38332 - DNA, 201 bp, Bos taurus
gtaaaacaggagatccttgggggcaagtcctgtgttttgatgaccatttggcccccaagtactcacctagaatatagtaggcctggagtaaatgtttgatraaggaaggaaaggagaaaaggaaggaagggagagagggaaggaagaaggaaggagaaaagctcagggaacagtggagactatgtccttggcccagcgtgg

SEQ ID NO: 38333 - DNA, 201 bp, Bos taurus
aacaaatgcccaaaatgtactggcctcaaacaatgatgttacaaatttgtgtgcatagagcaagcaagaatctggaggcagcttagctagatgccactgaytcagggcctcttcagggcaaggccaaaatcaaggaatcagccaggactgctgtcatctcaaaagtggatgtgacaaagatcccacggcggcaggctctgg

SEQ ID NO: 38334 - DNA, 201 bp, Bos taurus
gcctgagaatcacacatgctaagtaagtttcaccctccatcctcacatggagatacttccttcatgactaacttgaaaaatccaaattttgttttataatsaaatgtggcaatttctattaggccttccgaacttttaaagttaactcctggcaaatacagacttgaagttttctcctacattgtcccagaagctgaattt

SEQ ID NO: 38335 - DNA, 201 bp, Bos taurus
gagggcctccttttcagaagaattctcctttggacaaaattccttccaggaatcttctatctagttttccatttcaccagccccctacattaagttacccyactccttccccatgatacatgaacttgagttgtgtactttaacttctgagagttaagtatcatgccaatggttcatcaacccactgatgtccactagcaa

SEQ ID NO: 38336 - DNA, 201 bp, Bos taurus
gggaggcacacctgcaaaacagctcaggaagtttgcctccaatgcaatctagacatttcagagaggagctgaagcagaggataggagagaaggccaatccrgggaaggtcccacagggtcctgcttgattacagtccttgggttgcagtccaaaggaaccagcccctgtctgggggttcctgagaagccagagggccagct

SEQ ID NO: 38337 - DNA, 201 bp, Bos taurus
tgaggatgccatgtcttctatgtgtttgagagaacatctctgggcagaaaatgagcacaaaatggggggggaaaatgggaaatggtaaatagacttcatcyattctacaattctgcttgcctttagattaaaattgaaatgagagtaagaactaaggactgtcatgttttgaatagtaagagtgtcaaacttcagaattaa

SEQ ID NO: 38338 - DNA, 201 bp, Bos taurus
tggggccaaaaagagtaggacatgactgaagcgacttagcacacaaaatgccgtttcattccctcactttcctaattagtaactgcttggatctgctcttyggaattcgagggagacctaggagactaaagtctttttctgaacacaagaaatggggaacgcagaaagagctctgtattccagagagccccacagggtcca

SEQ ID NO: 38339 - DNA, 201 bp, Bos taurus
gcccagtcccttgcatcttctgatgctcgcaatatatttaaaagattcggctctgccaaatcggggtgtactgaaagcttctggatgaaaggcaagatccytgagtccggccaggaaaatcccagaatggatctcaggccagcagccaaggcctggctgcctctccgtgcccccaagagaaagttcagcaagttcaggttc

SEQ ID NO: 38340 - DNA, 201 bp, Bos taurus
ggttgtgcctgattaggacggcaaggtcagaaaccgcatcgccagtgttggaaacccattttccgatggcggcaaagaaaagatgtccactctgccctcarcttgcaggccaacataaggatacgtctgaagcacgcaaattatctttggcacttcccctttcttgacagcctcgagctggaggcacccaacttactgccc

SEQ ID NO: 38341 - DNA, 201 bp, Bos taurus
aacctgactcacatgtttaggaattactgatcaaaactaaccaaatgtttgttctttgtaatatcccttatataccattttagaatgtttaataaactgayatgacttcattatttctaagaaccaatgttctatgtaagtacccatagaatatgtgtgtgtatgcacatatatataaactatatattttatataaaatat

SEQ ID NO: 38342 - DNA, 201 bp, Bos taurus
taacagctccttcaactaagggcaccccctggggatcaagaggaaaagcaagaattctggaacctcttttttcctcctctgtgcatttactcccaagatgrtctcaccctgtctttttttttaaattagatttttgctatttaaaaaaaaatttattgaaatatagttgattcacaatgttgtgttagtttcaggtataca

SEQ ID NO: 38343 - DNA, 201 bp, Bos taurus
actccttgaatgttctctgttcaacctgtgctctctgcctagagaattctttcttcagatccttcttcaggcctcaaatgtcaactccctagaggccttcyctaacctcctcctcttccatcactgttacagcatccaattgtattgtctttgcaggattcacgactccctgaaatcctcctttgttttcttaattgttgt

SEQ ID NO: 38344 - DNA, 201 bp, Bos taurus
tttattccctgagacggtctgacccacagccgacactccgaaatggaaaagaccttccaggcagtcagcatttgagcacatttcccgcctgcggcctgtaytgacctcacctcaagtcaaaactcacaggaacgctagacttggatgatccgggacatggaaactttcaatcctaaagtgtgccccctcctcactgagact

SEQ ID NO: 38345 - DNA, 201 bp, Bos taurus
gtgagagataaactttggaggggtaaaatcttgaattggagggacttttcagaagagagattagcaaagggagttatcaggcagagttggaagctactctrtggccctctatggaactatgattactcaggcaatcggtgcacaagtactctagcgaacaactgccttgatgaaatgctaagcctttcctagccaatgtga

SEQ ID NO: 38346 - DNA, 201 bp, Bos taurus
aaatctaaatacagaaataacaaagtcaagaacggcagaccaaatttggctggcagtttttttttcttcccttttcctaatacagtttgaatgcgtgctcygttatttcctgtgtcttttattcacctgctttgctcattaaactgcctggcttctgatggcatttcagttcagattgtaggttctgttgatgagtgattt

SEQ ID NO: 38347 - DNA, 201 bp, Bos taurus
agtgaacgggcctgactattcttgttaaacttcacagaagcaggtgatgggactgatttgcctatgggctagagtggggttcacggacttgaatgcctgtygggggccaggcaggtatcttaatggagtcacgtggctgacggaactgccacttgtgccttgtctgaaagatgcagctacttcttacttatggccacttgt

SEQ ID NO: 38348 - DNA, 201 bp, Bos taurus
acaggctgttcctgtaatgtcaacaaatttcatgtgaaatctaaaaagaactcttttttttttccccttgtaataaataatgttgttaaacctgtattttyagagaagttgaactacacttgtattcattttcctttcaaagcagttaagtttacccccgttaaccactgtcttttaataccacagataaggtttagcagc

SEQ ID NO: 38349 - DNA, 201 bp, Bos taurus
tgctgatatcagtcatgacaatttctaatatctattgagcattttgtgtgtgccaggcgttgggcagaatacttgtgctggataatctcatgtaatcgtcycaagaagtctagatgctgttacatagaccccttgacagatgagaagacggatcaaagaaaggtttgccctgaattcttttctcacagacattcctgatta

SEQ ID NO: 38350 - DNA, 201 bp, Bos taurus
aggggttctgtccttaggttatcttttgagggatggccctgggtggtgacaggtcaaccttaaggtgacctttttttttttaaacagaggccgtagccccrtaaaagttttcttctcccctggcttcagctaggctggcatttctgacagacgtgtaaacagatgccagcattgtcgctaatgacaggtgattataagagg

SEQ ID NO: 38351 - DNA, 201 bp, Bos taurus
ttgcacctgggaagcctgttatctcggtatcaaatgtgatggtaacatatcgttctggaactaagtaggagatacagcgtgaaccactggggtgacaggayaggccaaccagttaggcgttacaaaaacaaagactggatcacagggagcccccagatcctcttcccatgattgcacacccctgctctgtatccagttacc

SEQ ID NO: 38352 - DNA, 201 bp, Bos taurus
tgaaaggcaatgctgtaactcgataggcctgtaatctgcacgctgagattaattggaaagaattagggaagggactacagggagccgccatcatccttccmggggaaattcgtagatggggcctcgtacgtctttgccacctccaccccgagagtcccattgataaatgcgcagtgcaggtgtctgattaatttagacctg

SEQ ID NO: 38353 - DNA, 201 bp, Bos taurus
agttcctttaccagggattgaacctgggccttctgcattggaagtgtggagtcttaaccactggaccaccagggaagtccctatgtgtcgcattttaaatraaggaggccttttaaataaagacggccagatggaggggctcatgttaggcaggcttgtcggccgcacaccctggctcctgtgcgtgtgtgtgtttgagtg

SEQ ID NO: 38354 - DNA, 201 bp, Bos taurus
tcatgcacaattcaccacgttctctttttccttcccataatgatgttccagatggtggagcctctatcatcctgggtcccaggctgaggacaacatggagyggagacccctgctgaccctcgatggatacgcaccgtgagcaagaaataaacctttgttgttttaagccactgagatttggggtcatttgttataacagca

SEQ ID NO: 38355 - DNA, 201 bp, Bos taurus
gaagtggccagaccccagatgatgctcaagaatcccaaacagctgagaatcctgagaagggcgggtttgtacccggccagctcagtaagaagcaaggtccrgatctcgtgacctgatgcagcttgggcactgcgaagctgccaggaagaggtggtgtgaaacctggtgggagggacccgaaacagctcccagtcctgtcta

SEQ ID NO: 38356 - DNA, 201 bp, Bos taurus
tcctgatcttgactgtgttgtcttataatccaaccaaatttaactgacattgagcatttctgatctgaacagttaacatggaaatttggcccaaataactktatatacattctgaacatgaactcggttcaggcatcagaaatgatggggaagacccctcccactaccatccagggagccaggcagggggcccctggtggg

SEQ ID NO: 38357 - DNA, 201 bp, Bos taurus
acattttaatggagtagaatctgtaaaaacactgaatcactaagctgtacacctgaaactaatataattttgtaaacagattcaatttttaaaataatcarttaagccatgagaaagaagaaacgggggaggcaagtggattactcaacacctgctgattcatctgtcttatttttatctcagcatacaattattaattct

SEQ ID NO: 38358 - DNA, 201 bp, Bos taurus
ccacacacacacacatgttcatccactcatacacactcatatacacacgcataaatgcatgcagtctcatacccacacatatatcatgctctggccagtcygggtttcccatctcaaacctatgccacctacatttgaaccatgtctctaacatgctccccaaagacctccctggaaggcaccccaggacacccccactcc

SEQ ID NO: 38359 - DNA, 201 bp, Bos taurus
ggaagaactgctagtgcggatcttgaccagaaggtagcaaatacatctggcctggctgagccgagagaccttaagttctcatgcaggtgagcatacggccrtggtgcccaccactggggagggctccccaggaaccctcccatacagtctgaccctgtgtggcacccatgccattttacagaaagggccaagcagagcact

SEQ ID NO: 38360 - DNA, 201 bp, Bos taurus
agatcctgccaagtgtccccaactttgctgaagacctgaggactttgcggttggcaggcacatggttcctaacaagctgtctttgggttgtggccatcccrgaagcagcagccagtgcattctaatatgtcacggctggtataagtgttggaagtagagtgatgcctttaagaagttactgggtggaagccactaccattt

SEQ ID NO: 38361 - DNA, 201 bp, Bos taurus
ggcccagtgaacttcgggcaagtttattagcttttctgttctttatctataaaatggcttaacaataatacctactttatagggtgagaattatgttagcrtgcctaagtatttagaagggtacctgcacttaagtgttctagtaattttctttttgtctgctgccaaattttcaaggaatgattatagtaccattgtaaa

SEQ ID NO: 38362 - DNA, 201 bp, Bos taurus
tgggatgataccctacaggacatctggggataccaacgcgaggctggtgcagatggaggtcctcatgaattaagtgtgatgttctgaggggctcacggggmtgcttgctgtcagtacttcagggccctccagggttggggggtgtttctggttttgtttctgttgtgtttgttttgtttcatttttctgtattatgtattt

SEQ ID NO: 38363 - DNA, 201 bp, Bos taurus
gagtttaggacaggaggaggtttctctccatttcagaagctgttttggtgtcctgtcccctttaataagatacacatgtcctagtcctggccatggcaggragggctggtaaattttaaatccacaaatctccaggagatttgcagtgaaatgaaggatggagaaggccctgcccctcagaaatgagggcagagcttagaa

SEQ ID NO: 38364 - DNA, 201 bp, Bos taurus
atgtgctgatggtggattctcaggccaccagccaggctgagggtagggggcacttgggaaggtagctctcccagagtccttcagtgataaccttatcagcyggccaggtacctcgagggtagaaaggatatcaggcccaagacccagctctgcttctaagtgctgtgtgactttcagcaactcactgacctctctgaattt

SEQ ID NO: 38365 - DNA, 201 bp, Bos taurus
ccctgactgaggatcgaacctggggccccctgcactcgagtgcagaggcttagccactgcaccaccagggaagttccctttgtacttttcatacagtagtrtgattgcctgggccatggtcttgcctctgagaggtgagcaccttgagggaagggactctcagcttggaatcaccaccatccatcccagagcctgactctt

SEQ ID NO: 38366 - DNA, 201 bp, Bos taurus
agcagctgtgactggagccccacagcagtgctgagagacaccaaggcccttccatctccggagatgtctttcttcaaggctcctaggacacagggcagggrttggaccccgtccaggaagtcaggccactgcctcgtcaccccaggatcttccctcctagcccagtgcccactgcaaacaccacctggctcctaccagtga

SEQ ID NO: 38367 - DNA, 201 bp, Bos taurus
aaggagggctgggcgggccccttactacctctaccgaacagtgaggcgctgtcattaccggtgtgcaagtaccccttcctgtgtcgtctctccccaggccytcagcatcctcatgctccctcacaacatcccacccagcctgaacctgctgaccagcatggtggatgacatgtggcattacgctggggaccagtccactga

SEQ ID NO: 38368 - DNA, 201 bp, Bos taurus
agctgtgtgatacagcacaggctggttaggcgaggaccactggctccagggaggggtgggcgctggtgccggagggctcagcaaggagcctcatgtggtgyccaaatgggccacggggtatccagaacagaccctgaatctgaacgcatctgcctcctccgacatctctcaccttctccctgattatcatccagcctccca

SEQ ID NO: 38369 - DNA, 201 bp, Bos taurus
cggccgagctgacccggaatgcctgcaggacccgctctagggatcttcgtctcatctgtatctacttctctagcacccgctttttccaggtcagcccctgytggtgggccatgaagggtgggtgctggccccttcctgggggctttgcaggcatccatgtctcctcctggccttctgcaacctcagccagttagcgcccct

SEQ ID NO: 38370 - DNA, 201 bp, Bos taurus
cttacagatggaaaaatgtcagatgagttcacagcttgaggccccccggtctgcccctgtctgctgtacccggggtgatgaagtgcatgcacaccagtctrcagctctcgtgctcagagtgggcctctgagtgggcttctgctcttctcaatcccaaattgctttctggggccaagcggaggggcatgattcagttctggt

SEQ ID NO: 38371 - DNA, 201 bp, Bos taurus
gcagctgagccctctgcatggggtaggcaccggcctctgaaatcacccacatgtccttttgacaaggttctgggctaggaagcagaaagttgaggctctckgctacaacacttagctccccctctttccatgcccatgggtgcttttgaggcaggatccagtgggaccaggctgcagccccaggggaacagtgaggtcaca

SEQ ID NO: 38372 - DNA, 201 bp, Bos taurus
ggaacctgcggcccagagaagcctagagagcggcccccaaccccatcctgaggtctccagcttccttggagcaccgtggtttcctcccaagtggcacatcrccccagggcctgtggtctctccctttgcagaagttcgtgagcacaaccatccggcccacactgatgccctaccctgagctctacaactgggacacctgtg

SEQ ID NO: 38373 - DNA, 201 bp, Bos taurus
cttagggctggcacgtgcccaccagcaacccactacagagagcagcagaaggaagccgacgccaccccggctgtgctaatcctcacaggaggtgcaccccrgggccgtgacctcattaccaaagccgcctctaggtggcaatttctcccctgccttcataaagagcaaccccacactgggtggcctggtcctcacggcctt

SEQ ID NO: 38374 - DNA, 201 bp, Bos taurus
tccatgctctaaggatggagttatggagcacaggaaaccggggttcctggtaggtaggtgggagtggttatctgtgcgtggtcaggtacagtgaaaggccrctgcttaagccagtttatgctgtttctgacacaaaccaagagaccagaatgaggcaggtggagaccagactggaggtccggagaggcagggaggggaaag

SEQ ID NO: 38375 - DNA, 201 bp, Bos taurus
gacgggactacaggtcttaaaagtgtgagtgttggacttccctagtggcctggtggttaagactccaggctcccaatgcagggggcacaggctcgatctckgatggggaagatctcactggccatgaggtgtaagggcccccccttaatagagtgtgagtgttccccactgtcccaggcctgctggtgagggccttgacac

SEQ ID NO: 38376 - DNA, 201 bp, Bos taurus
cagggcagagggattagggccgcggggccctggggcctccgtcccagcccacaccttctgctctccagccgcatcctcctgggccctttctgctcgtggayccagaaggggaccaccccagtcctttccgatgtgttttcctaactgactctcaggatggggaagttgtggtcaaggtgtctttccttccagaagcttctg

SEQ ID NO: 38377 - DNA, 201 bp, Bos taurus
aggggagtgcccaccctcgaggcccagagcaggtttcccagagtgagcttggatgtttccaggcagaggtccgaaagccgggaagggtttgaggaggattkggggaggctgggccagctcatggagctccagggcaggagggtatgctgagatgtgagcaggggtgggcggtgtgtggagctaacgataagctggtgtcct

SEQ ID NO: 38378 - DNA, 201 bp, Bos taurus
aatttcagaaaaatcaatgatataaccatagtgttcaaactacattttttcaagtattatatttttggtcacagaaaataggctctaatttttgttttcgkccaacttaaaactttttaaaattaatctgcaggcataaaaacatgacattagttttctgttctgtaggcataaaaacattagtttactgttctgaattaa

SEQ ID NO: 38379 - DNA, 201 bp, Bos taurus
atcatgatcatgatgatgatgactcatgatcatccatccctcagcctcccgctgtctaagccacagggttcatctatttaaaaacagccctaccatcagtrtgaaggattaatggccagggctcataagtgatcatcaaccaaaccgctctgagctcaactctttggctgctgctgtttgttgctctttccttccaggggg

SEQ ID NO: 38380 - DNA, 201 bp, Bos taurus
aaacaaattttattacaatatgttatacaacttaattttcttcccctaccagcccacacctatatactttcccttacatcatcctctccatatttattgcrtatttatcactccaccatttttaatgttgtactcaagccctgcttagtcacaaaaaatatccctgacaagttcaggttcaggcagttttctctttaaact

SEQ ID NO: 38381 - DNA, 201 bp, Bos taurus
accttggtagtcccttcagcttacatgcagaggcagccctgaaatgcagaggggataaccttgaaccattggtagttggaagacagtggataaatgcctcmgtctcctgttgttcagaagacaaattctagaagtaattttcatgcttcctagatgtcttggcagggtcaagaccttgttgccaaaatcagtgacctacat

SEQ ID NO: 38382 - DNA, 201 bp, Bos taurus
accattagcaccacctgggcaagcccctgacgtcttaattctcccagatttctatgagtcacttaaaatctcctggaggaagttttacatccttctaaatycattagttccacgggatgaagaacgggtatgggaatttgttatttacagttcagaagtgggacaggaattgagaagtagaatctagaattgcatatttgg

SEQ ID NO: 38383 - DNA, 201 bp, Bos taurus
caccttttcctcctccacaggtgctcgggaaccacttctcaattgaattgtgctagatatattagatattggctgcaagtaacaaaacattcaactttgcrtagcttaaacaatgcattctttttcttggagaacaagaaatccctatgtgcatggtttgggtcagtgattgggcagcttacagatgtattcagtgatact

SEQ ID NO: 38384 - DNA, 201 bp, Bos taurus
tacaacatatacacttctaagtaaaaagtttatactaatacaaatctacagtaagggcaaagaaagatatcaagtaaactacataatgttacacctaaagraactagaaaaagactaaaataagcccaaagatagcaaagggaaataaatagcaaagatcaaagtgaaaatcaatgaaatagggaatagaaaaccagtaga

SEQ ID NO: 38385 - DNA, 201 bp, Bos taurus
gaacaaggaaaggccttatctgctcccttttcatactgcattaatgcctcctattggttatttcagtcagttatatttagccaatcagagtagcagttccytgtacctaggcaaatggacagaggccaaggattggagagcaacataaattggaccaaattatcttgttccctcaatggccttagaagaaatgctcaaaga

SEQ ID NO: 38386 - DNA, 201 bp, Bos taurus
aaacctcattcctctagtttaatgcatatgtggccttggatagcattgttgaaccacagtgttgtctgtctctttctttctctaataaaataataataatrttattattatctcagaaggcctggtcttctgagaagcataagctaagagtggataaaatgggtaaggattatttttaaactttatttttaattttatttt

SEQ ID NO: 38387 - DNA, 201 bp, Bos taurus
acctaacaagtttgagatggtcagtgtagattagctcctattgtgttttttcttttcattgtaatatttagtgaagaaagttagggaaaatgattctcaaraatatgaacagcctcagaaagatatatgcccctcaaaaaataattttagtgcttgagactgttcacagcagccaagagcagctacaccagtatcaacttt

SEQ ID NO: 38388 - DNA, 201 bp, Bos taurus
atttatgctcaaacaatgaccaccaataagagtcattcagagaactgactttgggtataatgtaggtccattgctcgtactaattagtgaactagtgattyctgtcattctctctggtgttttaaagacaaggaagaaagactacattgtgcaaaatggagatttgtattctttttctttaaaataaagaaggtgtgtctc

SEQ ID NO: 38389 - DNA, 201 bp, Bos taurus
cgctcagtgtgatattcatagatgtaacacaaaaattgaagcagacatcctgaaactagcatctgttttcctgtcactgttttaggctattcattgatagkgttaacttttcacacaagcaatagctctgtaggggagtttttaaatctgtgcatcatagaagaggaagttgaaggcaaagggaaggaagtaattgtccat

SEQ ID NO: 38390 - DNA, 201 bp, Bos taurus
gaatatcagaattgccaatcattacttatgtatgatggtattattgaatcaataattataatagaaaaacactgtgaacaacttacatttaccagtattasatgcagactgtcatgaaatcattaaaaaggacataagcagacattttgccaaaggaaatatatcaacctttaacacacaaataaaaaaatgctcaacatc

SEQ ID NO: 38391 - DNA, 201 bp, Bos taurus
tatccttatgtaaatgcaatatggtttttctttctttgtcttcctccttcaagattttcttttgatctttggttttcagaagatttgaatatgatgtgtcyaggtgtgcatgttatatttattctacctaccattccaagtttcttgaatctataatttgacatcgttcattatgttaagaaaactgtcatcatttctcca

SEQ ID NO: 38392 - DNA, 201 bp, Bos taurus
ctggagccaaagaaccagccatacaaggtctgaggacccaaattagtgagaccactgaggaatctcatgtttaccagacaaagattagggtcagtgctaayacctgggtagtattggagttatcttggatagagaacataaaaaaaaaaatcagctgttggatgtacttctaccaattggtgttttgatatttgtgtcact

SEQ ID NO: 38393 - DNA, 201 bp, Bos taurus
ccagtttctggaacacccatcttaggcaggttggtgagatggcctcccaactctttgatttcacctgcttgtgccagtagtgactgctccagaagccacayctgtgggtgttgctcttggtggccggttggtgcggatccagcaggctcaggttcatgcacttctcccaatggaagacacaccccattgcccattgcctca

SEQ ID NO: 38394 - DNA, 201 bp, Bos taurus
ttagttgaacagtttcaagaaatctgaataaatccagagaatacagaggataatgaagataataaggagagtgactagaacagaggataataaaaaaaacygacaaaaggctgaaatcataggcagtggtatcttcctgtgggcatcttacaaatacattaaggatattagacttttacccaaaggagtttggagaaatta

SEQ ID NO: 38395 - DNA, 201 bp, Bos taurus
agtgatttctcattgtatgcctaaattggtgacttaacttttcagttttacaaggtaaaattagaggaaaataagtggttactctgatgttcacacctgtrtatacatagctgcaggaagaattgagaaaagagagtgatgtgggtgacatgtacaatgcagagatatagaacaaaggccggcatctcgtggcctgaaact

SEQ ID NO: 38396 - DNA, 201 bp, Bos taurus
tttgactcataataatgttatattattttaaattgatacataataaaccaaaagtaagtaatctatctatccaaaatatgtttcccatttagttggccttrtgcttttctcaagtaaagacaaagatttgactcaaacttcaaaagatttgaagtttgactcaaacttcaaaaactggggctaaatataaactaggataaa

SEQ ID NO: 38397 - DNA, 201 bp, Bos taurus
aagaggactatggttagcctagtgtcctgtatgtggtaaatgcttagtgattgagtctacggtcatttaaaataagaggcaaacgagacttctggcccatrttctgttgcattttactttaagaggtcaacctcaatctttcacttctattgcaaagccatctgtatatcctcctgttgaataaatgcctctgttatccat

SEQ ID NO: 38398 - DNA, 201 bp, Bos taurus
gacattttaatctaatccacatcctttgcaagttttctttgcccaagtccagtttttcttcctttcacacagggccataagaaattatctatcatggtttrctcacttatttttcattactagagtcatgaaagagggataaaatccgtgtatggaaaggcacactcttacaaagatataaggcattttcaacttgacaca

SEQ ID NO: 38399 - DNA, 201 bp, Bos taurus
atacagaatatttgtaaatctgcctaacctcttatttttatttatttaaattaacagcagcagcattcattgccttttggcccccaggtacagtgaactaytttttaaggaacttcaaaatatcatttaaaccttttaaaataattcagccaatacaagtgttgagaaagcatcatttgaattggcaaaccaaagaactgg

SEQ ID NO: 38400 - DNA, 201 bp, Bos taurus
gtttggcctaggggtcggccacatactatcttcagcagcctcttggcataagccccagccttcccaaagcagcaggcatccccaagcaggggcccaacctmgaaagcagagataggtttaacaaaaacataatgttgactttccccctccagtggggctattctgtaatgtgacttccatatgtttatataaaatgagtgt

SEQ ID NO: 38401 - DNA, 201 bp, Bos taurus
ccaagccatcagtgcaactgtttattgatttgttaaattcagttcttccaatagctgtttcaaatatcactgagtttcctttaaaaatatttccccacaargtaaaactttcagactcgctgagttatttcgtgctttagatgtgaagaaattctttatgataatatctaaaagtgtgttgccaaaaaaaccctaggtaaa

SEQ ID NO: 38402 - DNA, 201 bp, Bos taurus
aaaaaaaatgaattgtttaaactctacctgaaagccactacctagaggtcagctctgactgttgagatgggggattagcaagttttaaagagatgtgaacygctatcaccaaactgagaccatctactttctgtaatcagaaggactgaaatagcactagaaaaggaaactcattatgcaaataccattgttttgaacctt

SEQ ID NO: 38403 - DNA, 201 bp, Bos taurus
tagcatcaaggttgatttaaaaaaaaaaaaaagaaagtaagaaagaaaaagcttccaggatctcaccaaataaatacatttggaaaagaatccatctctcrgcttatgtgaaaataatgaaaagatgcacagtgatgacacatttcaggaataaatttgaagggaattgtttcatacaatttcacaaagggaccttaggga

SEQ ID NO: 38404 - DNA, 201 bp, Bos taurus
agaaggggtacatacaattgatataaagtgagacttgagacagtttcctaataattataattaatgctagaaattactgttaggctctataataatctgcractaatattaaatatagttattcctatcatctgcaacctcaaacctccagttttggtaaagcagctgaatcttgaggtttgttcatcatgatatgtgctc

SEQ ID NO: 38405 - DNA, 201 bp, Bos taurus
attgaggacttaagttttgtgataatcactgcatgttagtactttcaagaagaaaacagtctccgtttcctcataaatttgctgacagtgaaagcaagtgygaggccatgaggacgagggtgacacagctgtgggaccccacaaagatcctctggtgtgatttcctgccatcagctgttcagagtcagtggaggtctacac

SEQ ID NO: 38406 - DNA, 201 bp, Bos taurus
tctcttcaaaatgttcagcagttagatagacagggcttgctttctgagccccctgatcactgtctgggttctttggttaagtcactttgtcctgcagaacmctgtttttgtctcagcttaaggaataataattcctataaaataatgttgacaggataaattaatttatgtatctgattccccttagtgaagtaacgggaa

SEQ ID NO: 38407 - DNA, 201 bp, Bos taurus
aagcttgaaaaggaattcagatgcctcaaagggaaaggattagtagcaaagtaacatactatctggatttagggacactgttcaggatatgtatgaaagayggatcgtgctggagttgacagagcgaaaagtaaccctggaagcataaagatctgtgaggtggcaactgcagcaaaatcttggagaaagggattctggctt

SEQ ID NO: 38408 - DNA, 201 bp, Bos taurus
tgatgggagacgctgagtccccactctcttagagatgattgctttggtgaaaaaacaaaggctctcttcatcagaccttggccagtccacacccacaaacktgggactcttccagagaaatatccagattgtgaagcatgccaccacacggctagatgaccccacataacagagctgcacagagcccaccaccccaaccca

SEQ ID NO: 38409 - DNA, 201 bp, Bos taurus
tggaatgcttttacaattacagagtaactcaattcagatggtacatttttattagaaagacccaatctatatttagatctcctttctctctggggccatawatttagtgacttctcagaactcaaaagaccagacccaccattttggctgcaaaggacagagtcaaatagcaatcgttccccctctttcctgggagcatcc

SEQ ID NO: 38410 - DNA, 201 bp, Bos taurus
cagtgctacacaatccacagtgcatttgaatccaaggatgaaaaaccgctgatggggaggaaccgtggatatggagggccgaacagaaattttgtgtgcgytttcccttgcaaagagggttgacacccctagcccttgactgttcaagggcccgctatgcagctatggccccaggacagggaggatcccttgaacaaaatg

SEQ ID NO: 38411 - DNA, 201 bp, Bos taurus
tctagctcaccttcttctcattggaatggatgacacagactaatgaagacgtatccgtgatataagtcacaagccattatgaatcccactacccagccacytggccaagatgccttctggctcaacctcaggcatgagaagtcccacccagcaagtagaggtgcctgggaatgaaacaggctcacgggaatggacagctgg

SEQ ID NO: 38412 - DNA, 201 bp, Bos taurus
gatgagttgagccttaggcatttgcattgctcatttgtttcctgagtgattaggataaagaccagtctatattaaataagcccaccactgaaacaatgtgycaaggatacacagaggcccccgaaccctatgggggctggagactaatctgtccaccaggcttgcagcctgagccctgcccagaaaccaaagactctggga

SEQ ID NO: 38413 - DNA, 201 bp, Bos taurus
actccactgggaaaaaaaaactttccatgtgagggagtgcacaaactcatctctctcttttccctcctcacagcaaagcagaaggccatctctcacccgcrgtctcattatgctggcatcagctcaggagaggtgtgtacgtgtgtcagtcaggagaggccgaggcatgctgctgcaacaagtgcccccactctcccataa

SEQ ID NO: 38414 - DNA, 201 bp, Bos taurus
acacaactagatccgcttagctcacacagcagccaggccccacccaccctggctccgacggaggtcattcaagtccctccaaggtcaacagaccaggaagyaaccagggttctgggtgttctcaggccagctcctttttctggtctgttgggatgctgagtctcagcccctacgctgcccccagctctgatcgctggaccc

SEQ ID NO: 38415 - DNA, 201 bp, Bos taurus
gaagcgcagagccagcagcctaggggggaacacggggaggggctgcccatgagcctcagcgtctcctgcctggatgctcagagttaaatccggaagcaagrggggctggggccctgctgcagaggcttcagggctccaggagagaagagggggagcctgctggggggcgcccaagaaggggacttctgcctccagtccact

SEQ ID NO: 38416 - DNA, 201 bp, Bos taurus
gtcaggccagcatggggttcacaccaggacaggctgagctggaagaagtcacctggagagggattccgaggtcagcagcagtgatggccactccctcccayccgcctcaggcagcagaatgaacattttgcagccacatacctcatgccagggactgtctgtacataaacccagtcctcacggcaggtaaagtgttcttac

SEQ ID NO: 38417 - DNA, 201 bp, Bos taurus
cttcggagcaggtggggtgagtgcaggccaccgccaggctgcatctgggctcaggcctttgctgcctgatgctgactcactgcagccccgtggccccgtcrccttggagaccctgctgcggggctcccgcctccctgccctcgcctctgttctcagctctggctttggcatctcgttggggcctcagcaggaggcctggag

SEQ ID NO: 38418 - DNA, 201 bp, Bos taurus
aaccctgccccatgaagaactttgatcttggcaggccgcctccccccacgccaaagacagccgctcacaggactgggctcttgctttcaccaccccaaagktccaggtgaggccccgaggaagccacaggggcaaaactcccagggaccaccaaacgctcccctgcccccagcgacatctgtgtgggggagtctgctctcg

SEQ ID NO: 38419 - DNA, 201 bp, Bos taurus
cacccaggggaaggcgtgacccccgccgggttccgcgcaccaccaagtccaacagtgaaagaggctcgcgatagcgaagactggcgtggacaggtaggccmgggggcaggtgttcaggtagaaggcgcacacctgaggcagcagggctggggaagacgggatccccaggggaggcgggacggaggcccagggatccggcta

SEQ ID NO: 38420 - DNA, 201 bp, Bos taurus
caaacgcatcaatcacagccaattcccccgggcccaggtctttagattctgatttcacagaggcgaactttacaatgcctgaatgtatcatctctagcccstgtgacaggccagctctgaaggcatctgcttaatttttgcttggggatttacttatgggaggtggggaaggctgtgtctttcccagacattggggcattt

SEQ ID NO: 38421 - DNA, 201 bp, Bos taurus
gggggtgggggaggtggccagaccttcccctggtctgatgtgggggatgagcagggcagacatcaggtgacttttggtattactggcaggtggcagaaacycctgaggactggccggcactgatctggcagcagcagagagagctggcacagctgcggcacagccaagaagagctgctgcagcgcctgtgcgcccagcttg

SEQ ID NO: 38422 - DNA, 201 bp, Bos taurus
cctggcagctcaggacagggaacacggactagggagggaagccagcaccttgtgactctctcctctcacagggtcgcccccctgagaaccttgacctcccytgccaggcccaggtgactcaccgccagttcttggtgtgaggagggccctcctctagccgcaacagggcatagcgggcggcactcagggacaggcctcgga

SEQ ID NO: 38423 - DNA, 201 bp, Bos taurus
gtatactaagggtcgtgttacatgtaatactaattggcagaccaaacatctgccggaggcagaaggctgtagtgtgatgtctggactctaaattccatacytaggccctcaaggttggagatcctctgaaggcaggactgcttattggaagggtctttcacccacttaatgctgtttgctccctctcctttactactgttg

SEQ ID NO: 38424 - DNA, 201 bp, Bos taurus
gttgctctgagggttaggatgtctagaagtacattggatgtatttctagaaatagaaatacagctggatgtctagaaatccagctgcatctctggccttayccccaggtcctgcccagcctgttagctatgccctgacatcttatctgatactcactgccttatagccatcttcacccctggcctatttcaaccccacttc

SEQ ID NO: 38425 - DNA, 201 bp, Bos taurus
aacacctccagaaattcctgcacttcccgtgggactagtctatagaaaggagtttggttccaacacggtctgttaacataagtcttcactgagtttaacaygtatttctttgatctggaaggcaaacgtttggaaaagagatggtcaaggatagcaatgatgtactccctcagagctgtgaagtaaagggaccacggccac

SEQ ID NO: 38426 - DNA, 201 bp, Bos taurus
ggtgctggcccccgcacaggagggcaggccatggccctcatgggtccaagcccagagcctgtgctggtatgaatagtggaggctctgggcccactgccacrttcagccttcttgctgggtggctgctccactgcttgggagcatgtctgtgtctgcccagcttagatgggagcggccctagcttctcttgtgagaatccaa

SEQ ID NO: 38427 - DNA, 201 bp, Bos taurus
gattctagtagtcagaaaaggccttgctgagaaggggtcatctgagcaaagaatgaagaatactggggaacaagtatgcagctatgtctaggaaaagttgygaatgctaaagccctgaggccagagtgctaggggaacttcagctgagtccctcagggaggctgctggagcagagggaggagccagaacgcagtgggagat

SEQ ID NO: 38428 - DNA, 201 bp, Bos taurus
caaatgtcagacgcagagggcccaagcttttccagcacagcccacagctggaaatggtacaagcctcatattcattctttgtgttggagaagaggtttccrgaccttgttcatgacttactgaatgattcaaaatctggagctccgtgctggtgtcagcatgtttccacatccattagtgctggggaaatgctgcccccag

SEQ ID NO: 38429 - DNA, 201 bp, Bos taurus
taatacaatattgtaaagtttaaaaataaaatttaagaaaaaaatgcacagaagcttataatcacatttattagaaaaatattaccacttagaagttcctrtctttaaaggttgaagatctgctccaggcaccatctgctctgttttcgtcaaactccctcaacaaggcaggaatcccagttctctggatgcgcacaggtc

SEQ ID NO: 38430 - DNA, 201 bp, Bos taurus
tttttttctcttgcctggcataaacatttttgttttaatttttggcttttgatttattttttcacaggacagctattgtatttggacttatcaattatatygtattttctaatgttaatttccatttttagtgttaacttttttcaaccctttgttctagatttgccttatttattcagtcagtcgtttatagctgtttga

SEQ ID NO: 38431 - DNA, 201 bp, Bos taurus
tgatatttaggcgatggatcccattactttgcataatgtgggatgctgacattttcttcaaacatgtaatccttgtcattgagtgtgggaaggagagagaytgctacctgaagtaggggcagtacaggatggcactacagagaaatgacataaagccccaaataatagcaataatcattttccacttcctatcatgtcatt

SEQ ID NO: 38432 - DNA, 201 bp, Bos taurus
tcaaaatattttttgttggacttagaatcaagaagagtaaataatgtagctaacatttttaaagaaataactcccagcaaagatacaagaacattttagtratccctactgtcatggcagattccatgttactggcttatattgttggctttcagaatttagtttctctttattgctgtttctttctcagctcacatttta

SEQ ID NO: 38433 - DNA, 201 bp, Bos taurus
tttatggggcctaggaaaaaaactgagtttaggaacagtggtcctcaaatgtttgtatgttcataaattacctgggagacttcttggggaaaaaaaaaaargcagattgtgcttcagcaggcctggaatttggcccaggaatctgtgatttatacaggtagcctgagagattctcatgtgtagccacactttgagtgggag

SEQ ID NO: 38434 - DNA, 201 bp, Bos taurus
ccacacgcacccacaaactggcttacacgattctagattaaatgggatgctacattttccctgcagtgggtcccaaccataagatgaatattatgtaaaayataaatcaacaaccccttttcttccttctcctccttagcagtaaatttccgttaggtcctgggatgccttttggtggaagaaagaaaaccaagagcacag

SEQ ID NO: 38435 - DNA, 201 bp, Bos taurus
tggtgtttatccttctttgtttctggagatttcaagacagaactgtagccaaaactgagttgcttttttctgtcccttttcttcttggaaggaggggaagrggctattttcttcccctgggaagttctatgtggagtcctagctctcctaagaagatccacagaagcaacaagtgtaaaagatacctgggtaccaatattc

SEQ ID NO: 38436 - DNA, 201 bp, Bos taurus
ctttgctgcccatgaagcatttgcaaatcctcccagtctctattcacagactctgctggctcttcctttgtccagtgtctttcatctttccagggccaatstccaccctctgattcatcatcacaaggggactttccatttgttgtttgctatattctcatgcagccttatctttgatggtttccatttcagcactagtta

SEQ ID NO: 38437 - DNA, 201 bp, Bos taurus
ccaagatttcttgtttctccttcttgctacacagaattttttaatccagtgtgcacactgccatttcacagttgagtatatggcatcaagggtgacaaatyaggcagccgcaatcagaattacaggtatcgtgggactaattccattccttgccctgatttcaatgtgtttcccatatgatatgacggaagaggactgcgt

SEQ ID NO: 38438 - DNA, 201 bp, Bos taurus
ctgggctcatctgtgcagctctgtgagtctcacatgtgcacacacatgtcactgtagtcagacggtgggtcaacttcaggtgatcttgatggcctcatacrtgcgtctggtgttagaggcacaagactgagggtttctaaagcagcacgagtggggaaaccccaatacacaagcacttttctagcctctgatggcgtactt

SEQ ID NO: 38439 - DNA, 201 bp, Bos taurus
tttctcttaatacattgagatttcattctgagggtttctcaccttcattgtttctgaatagtagtcagctgtccacctgttcctcctctgaaggtaaactrtatgcttttcagatgttttcttgctctctcttttttgtttttgttttggctgttacacaattttagtgtgatatatcaagatacagatttactgtaattt

SEQ ID NO: 38440 - DNA, 201 bp, Bos taurus
tttggaaggacttgggcttggaccttgaatgaaaggattagccgttagaagatcttgagcagaagagagatggtggcttcggagttgagaacagaggccaraagtagacatcctactgctgtaatctgggttagtgatgacatcagctctgaccagcagccctgggggtgctaagaagtggcccaccctccagtagcactg

SEQ ID NO: 38441 - DNA, 201 bp, Bos taurus
tccaggacagaaaaggagctcctgaaccaaacccgtattcttgcccttgcaaacttgacattcttgcaacaaagtctaggcaccgactagtggggtatttyagactgttttcttattactaaatggaaaggtattaacacaatgcagaaattttttaaaaatgcagagggtgaggggcggggggagagaaaagaaaagaca

SEQ ID NO: 38442 - DNA, 201 bp, Bos taurus
cctcatctagctttttgtttattggggggatttttaatgaggggggtgtggttaggggctcatgatcctccattactttcttttgcattattacatgaacygtttcatcagggaaatagagaaactaattccagcagcttacaaagattgagtacaaaggggatagcttgggatccttagtccaccaccaacatacatagc

SEQ ID NO: 38443 - DNA, 201 bp, Bos taurus
aatgggggaggggttcctgatgaaaatgttagaacttttctccacaagaggacttctcaaatggcagaggaaggtgctcagcagagagagtgcgagtgctrggtccctccctttaactctcttactgaagaggatgtgctctgttgaaatctaactaaattcttaaaaccaccaccaccaagaaaaaaaaagaaccaccca

SEQ ID NO: 38444 - DNA, 201 bp, Bos taurus
ctctgcctacagcttctgtgtccatcacccagctgcttctcttcccccttgttctgtatgggtggagctcgatcccccaatgatgggatacaccagaattygagaccgtttcctctctgctcgagtagggttatcacaaaggaggggccagtcctcctcgcggtcagcctgaattgtcgctttgggaaagtcctgcatggg

SEQ ID NO: 38445 - DNA, 201 bp, Bos taurus
gagggcctcaagtgattctgcttgtccattcatttgaccatcattcactaaactttgtacaaggtccctatgccacttgcttgtgagacagagcgagaccrggtccctgggcccaagaagctcacatccagaataattaaccttttagatatcataaactcattaggaaatctgatgaaagtggcaggctcctagaaaaaa

SEQ ID NO: 38446 - DNA, 201 bp, Bos taurus
tgctgtacagcagagactgacacaacatgtaaatcaactatatttcaataaaaaaatttacctggcaccatcataaacaaaatcaaaagatgagtgacaakgtgagaaagatattaaccacatatattacagacaacagaacaaaccagtcaatcctaaacgatatcagtcctaaatattcattggaaggactgatgctga

SEQ ID NO: 38447 - DNA, 201 bp, Bos taurus
gaccgaagcattggaaatcaatccaaactaaatgtgcttcttaactgtaagtgaacagttgaaaacaatcctcttttatagccatggagataaatactctrtttttattaggaaaaaattgctttggactgaataaagtcatttgattaacaagtcaaagcagatggtttattgatatttcagaaaggagtttacaaggtc

SEQ ID NO: 38448 - DNA, 201 bp, Bos taurus
tgattatatagtagaaccaggtgagattgacaacacttgagccaccagaatctaaattctgtgtaggaaattgtgtgctagtcaactacactgatataacstgccatgctagcatatgtcttggttttaaaccccccacaaatctaccaaattattcatgttgtcctgatttttccactcttcatccttttctaccacttt

SEQ ID NO: 38449 - DNA, 201 bp, Bos taurus
gcttggagacagggcctttacacaaggaatgcagtgaaaacgaccagtgtccctcgatgaagagggcgggacccaaacacacagagggtggaccacgtgcrgacatggagaggacggccatccacaagccctatccttgcaacttttatctacatttgaaacattttcaaaacacagttaaaactttaaatatataggatg

SEQ ID NO: 38450 - DNA, 201 bp, Bos taurus
cagtagatccagttaagaggaatggtagtaattaaacagtctaaaaaattccattgttgcaaacaaatactgaatttgttgaaaggccttaactatttccrggcataactaatttaaaaagatacacaccaaaatggaggacaggagttctggagtggggcccaaggttctgaaatcagctagttgccaggtgatggctgc

SEQ ID NO: 38451 - DNA, 201 bp, Bos taurus
acctgtgcctccagttgagttacttttttctggctcctctgagattagatcgggaggagggaatagagaaggcatcaaagaaattgtcactcgtctgatcmtgcttgattaggttgatacttcctcttgtggggcactttcaagagtcagaaaactcaccctcattactgggcgtctgtaccctgcatttctcttggtggg

SEQ ID NO: 38452 - DNA, 201 bp, Bos taurus
tttgtaagaaaaatcactacccatataatttgaaggaacatgaaacttagttatgaaaattctttggcttttgtggtaagtttctaaccaactcaagcaaygtcagatgtattatcatttgggtccagtatacaatgccccttgtttcatttaaagaacccagactgaactatgtgaaacacatcgtctgtcctcagttaa

SEQ ID NO: 38453 - DNA, 201 bp, Bos taurus
agatccttaatttaattacatttgcaaagttctttctgccatgtaatgtgacatattcacaggttctgggcattagcacgtggatctctttggggcctctrttcagcccaccacaggtggaaaccattgtgggaactgtatgagtgcaggaaagcccagcagagattaggaggccgcctgtggtacccactgcctctcgtt

SEQ ID NO: 38454 - DNA, 201 bp, Bos taurus
tcagcctctatgcatctgtgtttttcttcacgtaattgatttctaatctcatagtgttgtggtcagaaattccttgggccaggaattttctggtggtccarcgtcttggactcagtgccctttgcgtgccacagtcgatggcaccttgcttctgtagcggcctgtgtttctcctgaaaattttcctggttgtggagctcct

SEQ ID NO: 38455 - DNA, 201 bp, Bos taurus
gaaggttaaatattgcagcagtactgcttgactgagaggtggctcactcatgagttcacgctctgtcttgagatatgtgtacttggttagtcgctcagtcrtatccgactgtctgcagccccatggactgtggcccactaggctcctctgcccatgggattttccaggcaaggatactggagtgggtttccatttcctact

SEQ ID NO: 38456 - DNA, 201 bp, Bos taurus
tgaggctccttgcagcagacaagatagatctttaagagtttaagaaggagaagtcttaaaggtatttcactcagattaggccctgtttgatgatttcacaytcaaaatgaagctacccacaaaaaaaactttgtgttgacaccggagggatggtgaacaccctaccccaacagcatctaccgccttgccggcccaccggtg

SEQ ID NO: 38457 - DNA, 201 bp, Bos taurus
tctgtagctgtggccactatacttcccttgcggggcacagtgggagatttattccccctccttttatggggtgtttcttatcaggccttgcacttgtaagyggtgaaaactgcaatgtgtattacctagaaaactcttaccttctgatagcaatcaccacaaaggccaggcagacagttacaacagaaaaatctcctggtg

SEQ ID NO: 38458 - DNA, 201 bp, Bos taurus
gcgcaggcagcccgggcagagggctcaccggggagcgtctgttgtcggttccagaccgagcgaagcgcctcggagttcgggccgcgcgggctgggcgggargaaggtgaggggaaacaggacggatcagcgttcttagttcttaacaatttccaaagaaggtgggagtgacaaagggacgccggaggccgccgccgccgcc

SEQ ID NO: 38459 - DNA, 201 bp, Bos taurus
tgttgctggttacccttgttgccatctttgtggctgtcatccttactgctgctccctgaccttgaagtcctactatgtgaacttctaaggttgtggaaccraaaggaacttcaggaaaccatgacctagctcaagcttgataggctgataagcctgtgtgccactgcttttgagaaatcttcttgaagggcactggatcaa

SEQ ID NO: 38460 - DNA, 201 bp, Bos taurus
ccaacacctggggaatgcagtgagattttcccatcccctctctggtaacttgtttgattacttccttttcttgggcccattttcaggatgtggaataaaaraagtgagtcaggcaaacaggtgtctggatacaaagtgtgtggctgaatcaaggcctccctcgacccattccccatctcttggaatatcttctttactttt

SEQ ID NO: 38461 - DNA, 201 bp, Bos taurus
ggctgctcccgccttccagcacctcctaggtcattgtcaggaaccgccaccgggccaaggtcagcgcaacccttcccaggacaggaggttaggctggcctrggcaccacagggaggctcctttttattgctcacccagccacttgctgaaaaattaatctgcaaatgaatcacatttactgagaccttctggatcagataa

SEQ ID NO: 38462 - DNA, 201 bp, Bos taurus
gtcatcccacccctgtatatggttctcagatgaccatcctccaaggctatgtaatcagttgcactcagagattagtagctagagagtgcagttcctgttgkctttgcctcccgcttccctcagttcccttggccctcactgctgcttcctgggtttgcatcttctaacaaggataggaggcatatgggcttttgctccaag

SEQ ID NO: 38463 - DNA, 201 bp, Bos taurus
gcagcctggcctccttacagggaagacagagcataaagttcaccccagatcaaaattcaaccattgtgaccatccagaagaaagcttcctgtgggcagagmcttggggccaacagagattcgcagtggattgcatacacagcgccaccagccggccagggccggatatgcagcaggtatgcagatagaaaggaagggatgg

SEQ ID NO: 38464 - DNA, 201 bp, Bos taurus
gtgggggtggggggtggtcaggccaagcgatttctgcatgtccaggggagttagagagggatgagtgggtggcagatagcagagtccctgagtgtcctgaycaggaacacccttgtggcctttgggctgctttgcttggccaagttgggggcaccctgcctggagagtcaggggcagaggggccaggcagactgctcactc

SEQ ID NO: 38465 - DNA, 201 bp, Bos taurus
tgcctggccacaagggtctctaatacaagacaggatcaacattaggtccaagggtgactggcatatgtctattgttgaaaatttggggtgtaaaggcatayaaaagagaagataaagaagaaaaaaacgacttcgatttggaggactataattcttttcctagtctaacaaattcatgtgtgtgagtgtgttgggtttgtg

SEQ ID NO: 38466 - DNA, 201 bp, Bos taurus
tgccctcacagaccctgtgaagggcactggccacccttttgtaccaggtaatcccacccagtgacctgggtctggatgaagatcagaagtccaacaatccrtcaactggcctgtgacctctgacccagcatcaaaagataagctgagccaatatactctgaggaatgggagagtaagaaaaatgttgttgggttggggcag

SEQ ID NO: 38467 - DNA, 201 bp, Bos taurus
taacccaatccatttcaagtgaagggtagtgatttttccatatggatattcattggtttcatcaccatttgttgggagactatcctgttcccataaatcaycttggctcctttatcaagagtcaatggattgcttaagggtgggcctacaactggatactttatgctgtttcattagtctatatgggaattccaatgccag

SEQ ID NO: 38468 - DNA, 201 bp, Bos taurus
aaggatgttccagccagagaggacaacatatgcaaaagccctgaggctgaagcagcctattgaatgtgagagagagaaaaagaaagaaaaattcaggaagrcagtgggtaaagacttgattcccctgtgtaggactgatcctaccccatcacccatttggtgagcctaccttctcccacacctggggtccttgcataaacc

SEQ ID NO: 38469 - DNA, 201 bp, Bos taurus
agcactgttttagttatatctcataaattgcaatatgttctattttccatttttttttcacttcaaaatagtttctaatttcccttggtttaagttttaaytcatttgtgtctttgaatttagggtaagattctttgagacagaatatagttggataatactttatttttaaaatccactctgacaatcctctgccttcta

SEQ ID NO: 38470 - DNA, 201 bp, Bos taurus
tatgggattcacgcggccccagtaatcctcggtttgtgggtggacttcagggtctctgcacacctctgaggtggaggccaggaatagacgggccccaactygctttgccagccccagcatgttcagtgtcccaacggtgttggtctttagtgtcttgaaggggttgtacatgtaactgggaggggaggcaggagaggccag

SEQ ID NO: 38471 - DNA, 201 bp, Bos taurus
tgaagaaactgcctccagacccttctgtgggcacatccatcaagatgacctatacttccttttccccaggactttctcagggaggcctggtagcaaatccygaaacctccagtgtttacagccccaagtgatattctgggctggctcctcctccctccactgctattagtgtcaattaagttcagcctgacaggccacctt

SEQ ID NO: 38472 - DNA, 201 bp, Bos taurus
ccagggatcgaactgaggtcccacgcgttggggagtgcggagtcttagccactagaacaccggggaagtccctccctaggtttcttttggtgttgtgtttytaacgtattggctttaatgcttaatcaatttatgtttattctgtgttaataatgttggtctttaaagctggtatgtattttaccctgagtccatctttga

SEQ ID NO: 38473 - DNA, 201 bp, Bos taurus
aattccttctttgatgaaactaaagagtcctgtaatctggaatcgcagtatatgaggaagggctgccaaattcagtgaaactcctaggagtgtagaaagaygctgagagaggaatctcaaagctgcagattttagaaaaacctgccaaagtttagtcctccaaactcactggcatatcctaggttggggggcgtggtggct

SEQ ID NO: 38474 - DNA, 201 bp, Bos taurus
gatcaccatggggtaggaatcttaggggcaatcttagaattctgcctaccacaggcagaattacaagttaaaaagaaaactagagtctggccaatactgastatctggcagcaactgaccagagtaccatctttgtatttttattcatttattcatttattttggctgcactgggccttcgttgctgtgcacaggcttttc

SEQ ID NO: 38475 - DNA, 201 bp, Bos taurus
cataggaagttttctaactcccctctttctcatccacctgggataaagcatggactctgtcacctcatgtctctcaggctggggcatattgtgacccagtkttggaaaatatccctaaaaaccaagccctaaatatattctttgatctataaaattgtgactctttgttcttttgaaggtgtttttgttcatgattcatca

SEQ ID NO: 38476 - DNA, 201 bp, Bos taurus
tggcccctcttcttcactgccctgctgtctgggtgaaggagcagccaaaggcattgttgctggagaaatgggaggtggcggcacctctggttttgtagttygggcccttgtgagcccacaggggccctagggactcagacttggaggaggcagagtgtttgggttgggtaccgttctgctgcctctgagcagccttctgag

SEQ ID NO: 38477 - DNA, 201 bp, Bos taurus
gcctggcccagagtgcctcaggcagcagaccacagcccttgtctccagacgtcggacactgctcgtggcacatggcgttgagtggagggatggccagcacmagaaccagcaacttcaaacctttcgctaaagatccagaaaagcaaaaacgatatgaagaatttttagcgaatatgaaacggggtcagaaaggtgggtgct

SEQ ID NO: 38478 - DNA, 201 bp, Bos taurus
acccagggaggcctgtttcagatgggtggggccagaaggctagaaaaataataaacaaaaacaaaagtgaagagaagcaaagctcttgggtgccagaaagrggctggccaaggctgtggctgcctgagtaatgggttccacatttgcctggctctcagcaaccaggatccagaatgcacagtgggccctgcaggggccaga

SEQ ID NO: 38479 - DNA, 201 bp, Bos taurus
ctgagaaatgagacccacttccccttccccagagagccaagcctgctccttttgcccttccacatccctctttacccggccctccaccctcagggctggcycaagtggtccgcattagtgggttcctttgcctctggcttttagtgggggttcagcccccagggattctccggctcaagattggaaagagagagggcattt

SEQ ID NO: 38480 - DNA, 201 bp, Bos taurus
gcccccacagcccccagtcccctataggaggcagtctcccagatgacacatgacaaaggctagactagagagggtggatatgggatgtggagaaaggtggrtggacttggagctccaaagccaagatctaggaaagaatggtaatggcaacaccactgataatggtaaggaaggaaaagatgtcagtaaccctcaaaaagc

SEQ ID NO: 38481 - DNA, 201 bp, Bos taurus
cacacatggattcctgaaccaatccctgtggctggggggagtgctgtgatttgactttacgtgcctgagtatgggaaccaatataagggaagaagaattarctttatactaatcaggcccacccgtggataaggggggtgagttcaagtttcccttaaacacagcaagctgcctgaggtaaggctgggtactgaagacaac

SEQ ID NO: 38482 - DNA, 201 bp, Bos taurus
ggatcctttcccacactgtgggtgtcggccacatcctctctaccacctcattcatgaggatctttttgctcccagcttcctggagaagggccagggtggaraggaaataatgccccccacttcccaatgccctgagcagacccctgacagccttgcccacatacaggccccacaggcacatccacacacagcctgacccac

SEQ ID NO: 38483 - DNA, 201 bp, Bos taurus
ggtttcacctcagaaagcttcagtgcccagatggtaatgctgctggctcatacctttccctggcaccagggcatggagaggggctggatatggccagggargaggtagcatcgggagctctgaactactgtatgaggaggagaggaaggaaaaacatgtcctttatagcagctgcctgaaaggaagacgctggggggtctt

SEQ ID NO: 38484 - DNA, 201 bp, Bos taurus
gggagggtggcaattgtcccagccacaccccttcccagctggaagccctggggggctgggcacccttcccgcaggggagggacaggcctgccaactgctcrtcccaagaaactggacccagggcagggcaggctcgggcgtgctaagttaaccctggggtgcagggcagagctggccccttgccacagtgaggacagacct

SEQ ID NO: 38485 - DNA, 201 bp, Bos taurus
cgcttcctctagccctccacacagctagctaaggctcccttttcttcttcaggcctcagatcaaataatgactgtcaggagaggccttcttgagtccccarcaagagaagccacacatagatctaggcatggtcccatgactgagttttgtggttttattttgtttatcacaaatgaaagacaactccctgagggcagagg

SEQ ID NO: 38486 - DNA, 201 bp, Bos taurus
ggtgacccactcccatcccccaccccccatccctgccctcatccttgggagagtgtggtgagtgaggtggctacgatttccacacccagagactcactgcycacatggcctcattccagcccttccttccttcctgtgagaagcacaaggctttagccaggccacctgggtttgaactggtgtccccccacccccacccca

SEQ ID NO: 38487 - DNA, 201 bp, Bos taurus
taggggcagggacaataggttggcctttttctggggtaatccaaaaatattcatcccatatctgttaaaactgttcaaatcacctgatggattggcccttytcactggctattgagttctcattctttttactttttaagtaaaaggtataggctttggtcccttttgtaaggcttgtatttacctcaagtgtcaccccat

SEQ ID NO: 38488 - DNA, 201 bp, Bos taurus
tttttcccttttcaatttcatttacttctagtcttataccatgttccttctccttgccttggctttattttgctcttacatttttccagtttcttagattrgcagccatgattgttaatttgagacatttttattttctgatataagatgtgaagttgtacatttctaagcactgctttagctgcatctatatattctgct

SEQ ID NO: 38489 - DNA, 201 bp, Bos taurus
gcccagctgggcagaaaccaggccagcatgtcctatgaattggtccgtggtccctgagatagcctgatttggaaatgcgttgtggggcagttataggcacytggagctctgtgtggggtcactggccatgaggtatggcctctgaaccatcacaggttgtctgggttctggactgagcctggatctggtgactagagaggt

SEQ ID NO: 38490 - DNA, 201 bp, Bos taurus
cccgaagagagggggcgggactagagcgcctgatggaagagggtctgggggcctgggttcttgggtccagaggatgaagtggcaggggacgccgattcttyggtcccaagagaggaagggcctgagtcttgctgaaggaggagactgggacctcaatttctgggtcccaaaagagaaatgttgcaggggctggactcctgg

SEQ ID NO: 38491 - DNA, 201 bp, Bos taurus
cagagcgtgacggtccgaacgtctctggagagaatgaactggtgttcggggtgcaggtgacctgtcaggtgcggcagccgccccgcctctcctctggcccrgtgaactgactgccgtggtcctcagctcagtataatgaagctgctgtatccccctgtccttcccactcccacagggccgttcctggccagttctccgcag

SEQ ID NO: 38492 - DNA, 201 bp, Bos taurus
ggattacacgagaagcgtttctttcctgagggcaaaactgagtttctgtctaatgacttcaaagttaagggggtacagaaatggaggcctaaaacctgacyaggattaagagttataaaagagagtttccccagattaagtgtgaaccccaaaatctagaccctcaaagtaagagttaacaagaagtcaactctcccataa

SEQ ID NO: 38493 - DNA, 201 bp, Bos taurus
gagacgtgagctgagaatgacatctgaaggagataatcgggcaaagagcagaaggaaaggtattctgggcagagggccaacacaagcaagggcttagaacrtgcagggcactgggggcactgcagtagaagtgaggcaggaggcgtgggcagggttcaggacccccaggctgaggagctcagactctggcccgatagtatt

SEQ ID NO: 38494 - DNA, 201 bp, Bos taurus
aaaagcaaggagtataacactgtctcataaggcttgcaatgtatgtagatataataaatataataatcataatataaagaggggaggctaaaaagacatayattgtggtaagatttctaaatataacatgaagcactaaaatgtaactcaaagtatactgtgaattacatatactgtgtatatcgcaatactctccaaagt

SEQ ID NO: 38495 - DNA, 201 bp, Bos taurus
cataagggggtttatatcattaacagaatgtgttaatttaatgtattccaccatcactcagatctgagaatcttcccattcattctacaaactcattaatrtaacaaatgtggggaagacatttatcgtcatctctagcccatcactttcctacttgtgttatactgaacaagatgcttaactgctccatactagaatttc

SEQ ID NO: 38496 - DNA, 201 bp, Bos taurus
ttacaagatatggccctgttacctgacctcctctatcaatcatccctttacacagacctctactataactttccccatattcctcaaatacaccagcagarttccactgtgaggcctttgctctaactttctctgtctagtatgctcttcccttagataaccagacttactccctcacaccttcaaatcttgactcagatc

SEQ ID NO: 38497 - DNA, 201 bp, Bos taurus
agaccagcagggatacccaggagcttacaggccctgcataactgtctcattcaatggatcttcctatgaaagttctggttagtctgcaggtccattgcttrctccagcctggttgtaaccacagttcagctgtgatggtggcctctcccatttgtttgctactgagactgcaactgttttaataatgcccaggggtgtggg

SEQ ID NO: 38498 - DNA, 201 bp, Bos taurus
acattgcagcgatatgagctcaagggccggctaccccgctcaggttcacaagacagccagcaccgagaccccgcggccctcacagctggcccaggccagcrccttccagctctccacctctgtccccaagtccttcttctccaagcagcccgtgcgcagcaagcaccccacggggtggaagaggacagacgagccccctcc

SEQ ID NO: 38499 - DNA, 201 bp, Bos taurus
gcccgctgcctcacatccgccccctctgtccaccccactcccagcctccagcctgccctgtctgcccccgggtctcctcctctgcaggttcctaaattacrtgccggtgcccctgacatttctctctcacctcgcccctggcaggccccggggcaggactgtctggggacccagcggtgactggagcccgagccctgtcct

SEQ ID NO: 38500 - DNA, 201 bp, Bos taurus
acttcatccactcccagcctttctggtccatggtagatgttgctcctggattctggtattctccctgccaaaccctccaggcagcctggcactccaggccytcactgcagttgactcaagagtttgtgagcaggggaaacctacttgccacatcccagacaaattaggacccctcagtgcctccagaagagcctgtggtcc

SEQ ID NO: 38501 - DNA, 201 bp, Bos taurus
agatggttggatggatggaagaatgcaagaatggatggatgaatggataggtgggtagatagaagggtggatggatggatggatggcctaggctggagtgratcaggtaggttttgaaagctccctgagtgattccagtttctgaccagggctgctcatgcgcaaaggtgtccagacagacagaaggtgaatgcacccgtg

SEQ ID NO: 38502 - DNA, 201 bp, Bos taurus
gggttgtggggacaaggtgagactctatccacaaagggctcatgaacagtagcttgtcacttgtgtgtgtgaaggcctgcgaccgttttctcctcacagargtccagagcagcaggaatgacagcctcccagccatacaccagcaaaggcctgctcaggtcacacagccagcaaggggctgagctgggagctggggttcca

SEQ ID NO: 38503 - DNA, 201 bp, Bos taurus
cagggttccctgagtgtccaggtcgccgcgtgggtacgaggctggaatgaccccgcagttgcctggggaacgttaagccgcgtccccgtgcccctgcaggyggtgatagcagactctgaataccaccacttccggtaccggatcccgccagggcgcgtgcgcgcgttggaggtgggcggggacctgcagctggagttggtg

SEQ ID NO: 38504 - DNA, 201 bp, Bos taurus
ccgccacggggctcttgctggaaatctcagctgccaaggtgaaagccgcatcaagcatgctctccttgtctgggaagagccggctgaggatgaaaggaatmggaaatcaggcaatctgagaagagctctcctctccctcccatggatgaagaagtgaccaatcgcagtagaaagtggaagacagcactggtgaaatggacc

SEQ ID NO: 38505 - DNA, 201 bp, Bos taurus
aacatgtatttaagaaaaaacgtcttggccacttcatgtgcagctggcaggatcttagttccccaaccagggactgaacctgggcccctgcagtgaaagcrccaaatcctaacattggacttgatacggaattcccagaaagcatgtaattatcacaacacattttattgacacccaaaaaaagactgagaggtcaagggc

SEQ ID NO: 38506 - DNA, 201 bp, Bos taurus
ggggaccacgctgggggcgcgtgtgggctctaggacaggctgcctgtgttggaaacccaactctgcaactcgagaggagcgcggcctcctatgggtgactkcgttttttctgaggctccgagctcctcctctcacaagtggagctcggaggactgaggaaggccacctggagggctgtgagcagtgagttccaatgtgagg

SEQ ID NO: 38507 - DNA, 201 bp, Bos taurus
agggtagggttccccctccctcgccccagtgatcaagggccactcactcgaacgaagtcacgaagcaggtctgggaaggagcgcccggcatcattatgagrttcttttccacggcccagccattcccgccgtgctccacctcccagcctctgaagccctctgtgggatataatagggttaaacacgggggattcgcgctcc

SEQ ID NO: 38508 - DNA, 201 bp, Bos taurus
gttaggagtccaaaatctcactgccaagggccgggtgttttggatacctggtctaggagctagtatcaccaaaacaaaacaaaaacaaaaaacactgcccyggccttttccatttttgttaaacggattatattacttttatcatagggaaaaaatacggcagtcttgtttatatttgatttgtgaactgtatgtatatct

SEQ ID NO: 38509 - DNA, 201 bp, Bos taurus
ccccagggaatcaggctgacattctttgtttctagaagttcccgccctaaatcctccctttctgaggtctcaggtgtgctcagtgtgaggctgcagctccrggctcctaaatgcaggtcttcctcctgcgttatttccgaaaccctcagagcctgggcctggtagcccagttggcgggtccatgattgtctctcgtgaatt

SEQ ID NO: 38510 - DNA, 201 bp, Bos taurus
actgaaggtgcccacatatttgggagcttttctcttaagctctgcccacctggagtcactgggaatgatgatcacctgaaaggcactcaagaggaagatgrtgccaatggacacatctctgccgactcttggaacatgaaaagcaagtgtgcatccaaggctgccagtgtttcaggaattcctttcaaatgaacaactaag

SEQ ID NO: 38511 - DNA, 201 bp, Bos taurus
catgaatgatttaagagacagaatggggcaggtgatacattcctatgacagtagcagacacaaacccaagttcctgaaaaccatttccactgaagcaaatmttccacaaccatgtgatgaaggatgagttcctcactgttccttggacctctcatctgattcatcatctccaaccattcatacctacctgggtaaatggct

SEQ ID NO: 38512 - DNA, 201 bp, Bos taurus
tcaaaagttcatcagcagcgtttgaacaagaaggaaacacaggtccagggaagtatatgacttgttcaagggcagagaggtggggccaagatcctaatcayggcttcctgactctttgaatgcttgccctcaaccataatgctcaactcggaccttagagtaacatggacagaagccccctgctcttaactcgtgttctct

SEQ ID NO: 38513 - DNA, 201 bp, Bos taurus
cctgccactcaaaagcaaataatcaggccaggttggtgggaaggaacgtttgctttatttcagatgctggcaactaggttgggggaggatggtggacatcratccaaaggccaactccaccccaccccaaaaggggatgagagcttttatagacagggggaggggggctacaggcggaaacagcacagtcctctccaacag

SEQ ID NO: 38514 - DNA, 201 bp, Bos taurus
aaaccaaagcacagagatgagaacttgcccattctgtccttataccacctacccctcatcactccattgctccgtggaactggactcctagggccaaggawggatggacattcttgacggctttgtatgttgtttttctcagcagatcttaacctcttcaactctgtctaggatgctgcgtcagtatgttcgccagtttcg

SEQ ID NO: 38515 - DNA, 201 bp, Bos taurus
gaggagtcctgctagcctcccgtgggtggagggaggccagagttacagcgaaacctccctcaatgcacaggacagctcacttccccaccccagcaagaaaycacccagtcccagggcttccctggtagctcagtggtgaagaatacgcctgccaatgcaggagacacgggttcaatccctggtccaggaagatcccacatg

SEQ ID NO: 38516 - DNA, 201 bp, Bos taurus
tgagtggccctggagggttttgagcaggacggctggaacttacgtatattagaaaggacgctctctggctgaaggagaggtggagggggacgggtggatgytgggagaggagtgggacaggccgttgccatggtgaccgaggcacagggtgatggtggcttggaccagaggggtggggatgggagtacggaggagtagggc

SEQ ID NO: 38517 - DNA, 201 bp, Bos taurus
agtttgggattgtctgttgcctgggttctcagccggggtgggggtggggggggggggcaggtgggcgatggtatccccagggggcctccactgagggcagyggagatggtttcagttgttacagctcggatgctactggcaggtggcgggtgagagccggggtgctgtggggccgcctccagggcagaggacggcccagtt

SEQ ID NO: 38518 - DNA, 201 bp, Bos taurus
tgctggccgcgaagggaaccagcctcgcggaggctttaacccgttcccttccgtcttaaagggaccgacacccaagccttcttccccagactcgagggccragcacagaagggttgggtgtttgcggagaggcacccctccctccctctcgtcttcgcctgtcccttacttttctccttcatatacattcaaaggttgggg

SEQ ID NO: 38519 - DNA, 201 bp, Bos taurus
aggagcctggcaggcgacagtccatggggtcgcaaagagtcggacacgactgagcaactcaacagcaacacatcagaggcagaaacacaggtgtgtgggaycagaacacaggccgacagttctgtatctcagcgagtacgtaggaccaagcagttttctttctgctctgtgtgggtctctctgttctgccccgggctgggc

SEQ ID NO: 38520 - DNA, 201 bp, Bos taurus
aggggccatgtgtgtagaaggagaggtgcaagaggatgaaaggacaggcacgaacaggagtctctgggagctgtgatgtagggagacatgagggggcttcyggaggatcctatgaggagttactgtgcgttgagattcatgtcagggcttctactgatacagttccatcggactcacggagcagtcgcataggagggccag

SEQ ID NO: 38521 - DNA, 201 bp, Bos taurus
ctcatcaaccttacaagcgtttgcacagcaagggaatttagaaagaaaaagacagccctcagaatggggaaaatatttgcaaatgaagaggcccataagcrattcatctccagaacatacaaacagcttgtacagctcaatatttttttaaaaatgcagtagaaaaatgggccagagctctaaatggatacttcatcagag

SEQ ID NO: 38522 - DNA, 201 bp, Bos taurus
gaccacgactcccgccctcccgcgcgcagaccgaatcgccgaccctatggcgcccccctgggcccggctcagcagcggtcgccacccggaccggactctcycctcagaaccggccagacctcggtccgggcttcaagtccttgtcagaagtgggcgagtcctcacagcgcaagggcccctgggcaacttagtcccaacagg

SEQ ID NO: 38523 - DNA, 201 bp, Bos taurus
atcagccactgcagccaccctagccagtgtaccctgaggggaatttgggatgcagaaaaacaggatactgactctcagtagtgaagatgcatatccaggarctatttcaatgagcccagacccttgtatattcctgtacatagagaagcactgaattcactaacttgagatgtctgcttttcacgattaccagtaatcttc

SEQ ID NO: 38524 - DNA, 201 bp, Bos taurus
caggagaagacacagttaactctcagttaagatttagctcttccacaaaagacactagacacatgcagatagcatagggatgataccacacaagaatattrcttcaagactgagaaaggtaactttaatctaatttcataaagacaaggagagaaagttaatgaagtgagaaaacaaagaaatatgtttaaaataaaaaga

SEQ ID NO: 38525 - DNA, 201 bp, Bos taurus
tctcttcttaaacatcttcctgctggacaggggctgcatactttagcctttattagtggcatagaagtccctctctgaatgtcccaaggacctgtagggaygtgggccactctccactgaaatgtgttgaattccttgagctatcatgagacttcaaaatactgtagcctagaagacatgtgtgtgtgcacgtgtgctaag

SEQ ID NO: 38526 - DNA, 201 bp, Bos taurus
gccacacaggtcatggacacaaatcctgtctcagccaaaacctcctctggcaatgtaagtccaagcaggctaaatgcaaacccacttcaaagcttcctctrgctatgctggcctctgagggtgtacctgagcctgtaccccagttggcctctgcagacacatgtgctctagaccagctccagaaacatatattgttgagag

SEQ ID NO: 38527 - DNA, 201 bp, Bos taurus
cttaatcttatacttctatgttcatgttcagtcttaaaactcccctaaattatttgttctaaactcagcaatctttcccctgttcttgtattgctgatcckgttagtgatgtcaattgtcttgttgttcacactgcttgctgaacccagggtaggcaagacatgagctaagaggctggaagaagactccaggaactgtagg

SEQ ID NO: 38528 - DNA, 201 bp, Bos taurus
tttgctgaaggtttgaagtgaggcatttggcactggggcttgctggactttggatggggcttggtcttagtgttgagatggaggcacttgggagagcactygctgattaacatttcatgaggttgggatttctctgatggtacaatgtcctggcctcatgtttcccacctcagggtttcagacctgacccctttctatagc

SEQ ID NO: 38529 - DNA, 201 bp, Bos taurus
cttctggcaaatctgggccatctgggatcccaagaagatgtgggtagagactggtgggtgggtcacagctttgcaacagatgtggtctctagaactgagaytgcagtgggcccttgccttctgcctctcactatcacatgcctgcctctctgcctccatggctgtagatgggagccagcttgccacccttcagtattttct

SEQ ID NO: 38530 - DNA, 201 bp, Bos taurus
ggcaagagtactggagtgggggtgctattgccttctctgtctagctgtacagttagaatcaaatgtcttaacatctccatacttaggatatctcaactatyagctaagtgtagatcatatgaatagtatctcctagtagagttgtttcatactattcatggggttttcaagacaagaatactaaagtggtttgccatgccc

SEQ ID NO: 38531 - DNA, 201 bp, Bos taurus
aggatgactgtgcctcagatcatcaggtccttatttcaaaattcaggttcacattaaagaaagcagggaaaacgactaggccactgatgtatgaccccccmcacacacacacacaaacacacaaaaaaaattcccttatgattatacagtggaggtgatgaatagatttaatgacctagatcaggtacacagagttcctga

SEQ ID NO: 38532 - DNA, 201 bp, Bos taurus
gaaataatgagagttcaggatgcagtgagtggtctgctaattttctgcttctaaggccatctcccataagctctgttataactgcagcatgtgggacaaaytcctcatagcaatggcccctaagacctgacttgatccatatctccctgaactgtaggatctcacttcctggtacgtaactctttattcattgtattagtt

SEQ ID NO: 38533 - DNA, 201 bp, Bos taurus
tttgattgtctgacattggttcattaatgttcatgatcttgctttctttgtcctccaagctttgcagaagcaggcatatgttttacagaaccaaacttgaytcaattcactcatgcatagtcaagcccatttactgacaccaggttgtgatgaaggaaattgcagcatttattgtagggcatagtataaggagaatgggtg

SEQ ID NO: 38534 - DNA, 201 bp, Bos taurus
aacttttcatgttgtctcctctgacactcttgtggatgagatcttattccaaccagacagtggtaaagccctgagtctccacttggcctcctccagtgtcrctccagaaggaaggtaaaggggcactttgctactggtgaggtgcacgttcaggctccttacctggccttcactgatactataatcagggcatgaggaatg

SEQ ID NO: 38535 - DNA, 201 bp, Bos taurus
agatcctacataagttacaacttagaatcaagctgtgtcctaaaataagaatgcaatataacctagagagtttcatcctgatttaactaaggagatcataygattcattgtccaaacatagcatttttgaaagtaaaagagggttatattaataatgactttctcatatgcaacattcaatttttatagactgcaaggaga

SEQ ID NO: 38536 - DNA, 201 bp, Bos taurus
tctcccagcctcttgccagttttacaacccatgaatgtctttctccaggagccatccttctaaactgtaatcatcaagaaagatagcacccctatctctcygtctctgtgggagggtagcaacctaactttgacaagcaccaattagcaaatacagattgcaacagtatggagtaaagccttccttgcctgtttaactcag

SEQ ID NO: 38537 - DNA, 201 bp, Bos taurus
actgttattcctttgattcaggtgagaaactgggcgcagaggagttcagccactcacccaaagacacatagtaagcaaacagggattcaaaccgccagtcyagccccaggagttgctctctttattgctagcaaatgatgtcttcttcctactacactgtcaactcagtacagagcccacccctgcagagtgaaatagata

SEQ ID NO: 38538 - DNA, 201 bp, Bos taurus
aactgtaagctgagcactattgataatgacagttggaatctcaggacataacttgaagaacccacacccacagctcagcagggatagagaatggcccaggygatactgaaacatccttcgccctcaaagtgggaatgctacttgtaagcctgagatacacaggtggaactaaacagaaggaagtgccatctgcccaaggcc

SEQ ID NO: 38539 - DNA, 201 bp, Bos taurus
ggaattctgaggtgctggcagctgtctagggtccagccaacttctgctgcctgatgtaatttgaattaagttctttgttgatagaaacaattctgtgcacygtgtttcttgatatgggtgtagacatttatttgatatgttcccgttttcccccaactttggctgtgtgacccctgcagttgctggatgagttgccagttt

SEQ ID NO: 38540 - DNA, 201 bp, Bos taurus
tgacaaaattcaacattcattcatgataaaaaacccttaccaaactgggtgtagaagaaacatatctcaatgtaataaaagctgtgacaaacccacagccratagaatattcagtggtaaaaagctgaagaccttatcactaaaatctaggacaaggatggcaattctcaccacttcttttctacatagtattagaagtcc

SEQ ID NO: 38541 - DNA, 201 bp, Bos taurus
tcattaattactttcttagatgcccccactgctatacacaaccacactgggggttggggcttcaacatacgaattttgcaggaacacacacgctcagtccrtaacaacagcaaaactgttaagcaggcagtagttaataattgagaattaatatactgtttacatttgaaagagaagtctgagtacattttttgctctgca

SEQ ID NO: 38542 - DNA, 201 bp, Bos taurus
tctgccaaccaattaacctccctgagggccaattgccatgaacattaaatgacaaatgggtatactttcatgtgagtcctccccacacaaaaagttctccrttcattcctctggccccacttcaaagctgcatcttcattttcacaagtgacaaagagcaagacaagattctccatatccaaaatagaaacggttcattcc

SEQ ID NO: 38543 - DNA, 201 bp, Bos taurus
ctggaggtgtgggaccctcccccacgtgctgctgctgttcagtctgctgtgtctcagtttagtagaatgttggggaaaagaacctccctcctactagggtraggtcgcagaggcctctggagaaaacagagcagaaaattatttaaacaactgcggcatttgaaaaatcattttgagaaaggtttaaaatattttttaaaa

SEQ ID NO: 38544 - DNA, 201 bp, Bos taurus
catccactgcagatctcagcagccactagaagctggaaccaagcagagcctggctaatgagaatctccatcctctgccagtgcctgggggcccatcccttyctctctggcaagcaggatacaaagagagctcaaagcagagtgaggaccaaaaggtcacccagaacattcattctgcaagctccccaccaggcctttctga

SEQ ID NO: 38545 - DNA, 201 bp, Bos taurus
agagagactggcctatcaattgcctgatgcactgaattacagaataggacccagccaaggtgcccttttagtgcctgatgcacagatctacagagtaagaygccagccaggggggcccctctatgtgcctgatatgtggaacaacagaaaaggaccccaggcaagggaactctctaagtgcctgaatgggtggggctatgg

SEQ ID NO: 38546 - DNA, 201 bp, Bos taurus
agttggtcttccacagtagttaaactaaaatcttggcccctttactctgagtctcaaagccctttggacccagggctgctacctctctggcctcagctgckacagctctccctcatcacagtgctctggaacccctggctttctgttccctgagtaagccagcctgtcaacctaaggaccctctcccaagccaggaatggg

SEQ ID NO: 38547 - DNA, 201 bp, Bos taurus
tcatttcctggaccacaacatactagtcaggcagatggtccagggacttttggctctgatagggcttagtccagtaacagcacaccaagtggcccatcaaygaaatcttagcctgacctaggagcaagtgatcctagcactctggcacaaaatagtcatgaaatgcctcccagtccatggtccaatttatggccatgatgg

SEQ ID NO: 38548 - DNA, 201 bp, Bos taurus
gaagtgacttagcagcagcagcagcctcatagagttgcagagccagataccaggaccagctcagcctcactcaggccccagacacactgaaactctgagayaagaaatgttgatacatttggtacagagtgtaggtggctaatcctccacctcacttcactcaggtctcttctcaaatgtctcctaacacatccaaaacca

SEQ ID NO: 38549 - DNA, 201 bp, Bos taurus
cagtctaaatctagctccactgactggaggcaatttgttggtacagccttttccaaaatgaagatggagacaggtacagccgcaggaacattgggcatgayctgatatctagtacctctggagttatcccttgtttcccaccttgatgcatatgtttcaagctaactccttctccatccccagctctcctaacgatactgt

SEQ ID NO: 38550 - DNA, 201 bp, Bos taurus
tttttcaactcctgcactggtgccctccgcccacagtggattcacaataaccacagggactcctctaagtaacctcaggcagttaggggcccattaagacsttttagaactaacacacaaaaaagatgtccttttcattataggggagtggaatgcaacagtaggaagtcaagaaacacctggactaacaggaaaatttgg

SEQ ID NO: 38551 - DNA, 201 bp, Bos taurus
agtgcctagcaaagagccttacatgaggacatgctcagtgaatactggtccttctctccctcctctctccatcaccaagcaccaggcctgtgtctctttcmtattgagatctggtcttacattattctggtaaacattaataatgttattcttctttacaagccctgtatctggccaatgctgagactatagacaactctt

SEQ ID NO: 38552 - DNA, 201 bp, Bos taurus
tggatctgtagacagtcctatgaaatagacagaaaagggattagttcccacatcatgtaatgaccacagcaggaatggggagcccactgtaaaggaggccrgtaagttcatatttctcatttctcagaggcagagctccccttcctggtctgcagtgtcagagagaaaagttggcgtcagttcttggccgactgcttccca

SEQ ID NO: 38553 - DNA, 201 bp, Bos taurus
atcactcagcagctgggttcctgctgccccagctgtcaagtttccagctcatgcattcagttatccatcaatggagatctcaggggcagttgagcgggagyggacaaaccagcctttctttatgccaacagggaatgcttgaaataaccagacacacaactctgattgatgcggccacagtttacacaccacactacggac

SEQ ID NO: 38554 - DNA, 201 bp, Bos taurus
taggacagaataactctaagggaataacttcttgtgcaaaattttccccaaatggaggagaaaccatgtttaatcatttttcctggattgttgtctttctyaagattctcacctccttcctcgtgtgcttggtaccccaagtcacatgcccagagtaaacactctcaatgactcaaagttactgcatcatgattcctaggc

SEQ ID NO: 38555 - DNA, 201 bp, Bos taurus
acgggggaaagttggctcctagcaaaggcagcacaaggcagggggtggaatgcctggtccatggctaggtattttctctcccactccttttctgtgggtayagtggtcacagacagcagcaatttttttttttccccgatactgctatttctcctagtgatgcatgggtgaggcaacaaaggggaggggaggcgttgtttc

SEQ ID NO: 38556 - DNA, 201 bp, Bos taurus
gatggcgtctgagacagggaaatcactgactcccagctcaggaatgaacaggggccggattcttgacaggctttttacgacgggatcttctgctgagggaytgcggggaagacagcattcaagaaatactgcatttagttggaacatgacagggggctggtggtgaaatcagcatcatcaccccagaagaagcagagaaag

SEQ ID NO: 38557 - DNA, 201 bp, Bos taurus
ctctgatttcaaaggctggcaagcttgcctctgagccagcacccacccaggcccggctgacctcaccacgacagctaacccatgacatcagagcggccccrggcagagagtctggtgaattagcactatctaaagagaaggaggatggagttacaagctcacgagtgggggagaactggagaatccttcctggcttcactc

SEQ ID NO: 38558 - DNA, 201 bp, Bos taurus
gtcagcggcctgctttgatcgccacaaaagacttcacctgcccacttgaaggaaacaagttaatatatagccctagaatggtagaacgaggcagatttgcrgtaatttatcgagtgcttctggcccacactccttagccaacctgcccttttggggtaaaacttggctcttaactttcatccagaggtctctaagtgctgc

SEQ ID NO: 38559 - DNA, 201 bp, Bos taurus
gaagcaccccgacccgcgtggccttggtggagggcagggttttctccacattgttgtgccaggcggagatcttggtgttgaaccactccacacaccaggaygcgttgttgcggccaagccggctttcggggccctgccgctccatgctgccgtagcagatacccaccccgcagaagttgttcttctgcagctccacctccc

SEQ ID NO: 38560 - DNA, 201 bp, Bos taurus
tccagagacatcttaaatgtcataggaagaattgcagttgttaaaacagggatgcgggcagaaagaaatagttaacttttgattttccaacttaagggccygaagcctacttaagaaacattaggaaaccacggtctttgattttgcaatggaaaataaaggacatttgaggatcaaaaggatcctgcaaaaaaaaaaaag

SEQ ID NO: 38561 - DNA, 201 bp, Bos taurus
taggcagtctgcaaggacttcctgtgtgcaagtcttgtctgttttttgttctttaataggtggtgcacataacacaatacatgattccaaagaaaaacgargagaagagggcaccgccacctccttttctgtcccccagacacacgtctcctctttgggagactgttatgaggttcccctgttcctgctcagcacatgtga

SEQ ID NO: 38562 - DNA, 201 bp, Bos taurus
ctctctggattcgcggagaccccagtacttttagaccaaaatctcccttttggcttcaatttgcacccaaagcgctcctagttagttagcagaccgggagyggccagggccccgtgagaaggtgctccaagcctctgtgagcgcctgccacaccccagccttgccttttggcatctggagctgagactgtcctgttcttag

SEQ ID NO: 38563 - DNA, 201 bp, Bos taurus
ggacctctgcggttggaaggacacagaggcaggaaccttaactcaggcttgaaagcaaagtaacgagtctggctgaagctgcctgggtagcagagtgatcmctatggcagaggaatcaccgcactacgacaaaagctgaaagcatgcagtgccggatgcctctaggaagggtggggctgttttaaaaggacactgtgcacc

SEQ ID NO: 38564 - DNA, 201 bp, Bos taurus
ctgtcgctcctgacttggcccccctttatgccgcccctctgcttctccatccattgtggtagcaaatccctctctgcttgcccaccctcctaaaaacttayggccagctgatctttgcatctgattcctgtggcattcattacccacaatggacaactggcatcttgtgatattccgtccttctcctggagtgtatgcatg

SEQ ID NO: 38565 - DNA, 201 bp, Bos taurus
agctccatgctcatgtagagcaggggttgacacacggactaaaaaggcccagatagcaagtaatttgaggctctgtgggccttatggttctgctggtacaktacaaaaggagaaatatgtaaatgagcgaccatggctgtgttccaataaagttttatttacaaaaacaggcagtgggccagatttggcctgggggccata

SEQ ID NO: 38566 - DNA, 201 bp, Bos taurus
gcacacttgggcctgttctctgcgctcggctgaatcggctgagctaagagaggttaagaggaggcggtgctcaccccactgctgaaggccagggggctcckctggagagctggccatcctaaagacaagctgctctgtttagaatcgggctgctgccacagacctctgatgaatggcaatgcgcgcagcgctagatctcag

SEQ ID NO: 38567 - DNA, 201 bp, Bos taurus
gaagctgcggatgacctctgtcgtggtcgctctgcaccctagggagtgtgcccgctcggggcctccttttacttggcccctagtggctccgtgctgcccayctgcccatctgccctccctccgtctcctgactccttgtggtttcccagtacgccgtgcagggcctgctctgcgtcctgcagctcaggttgcccgctctgc

SEQ ID NO: 38568 - DNA, 201 bp, Bos taurus
ttcttttaaaggttccataccacacctctgtggggcaggccgtactgaaccaccctaaaaccccgcaggtttggtgacagatggacttcgagtgttgcttrtatgatgggaaagtgcaagcatgggcctcaggtgggcctcaggccgaatcagctcagacttaacttccaccaaatggtaccctctcctttgcatgctgga

SEQ ID NO: 38569 - DNA, 201 bp, Bos taurus
aggaagtactattgtgctcttgcctgtctcagggccctactgtgctaggataagcccatttttaccctgtttcatcatatcgtttccttcccaaggtcttkcaagggtctcggtggcccatggggatgcttttccagtggtcctatgctgacagtcgatgtagccacagaatgaacaaaatgcatcttcctgaaacaacat

SEQ ID NO: 38570 - DNA, 201 bp, Bos taurus
aacttgaggaagtgattcacagggaagggcaagggccacctagatgaataccttcgaggataacaacggaagaccatggggcgacagttaccgttccagcractgggccgctgctgatacactggctccacaatgccagctgcatctttgaactttagggctctttaaggaaatggcacctgttcatcttccaaatcctct

SEQ ID NO: 38571 - DNA, 201 bp, Bos taurus
ttatgatacttctattcaatggaaggcagtaacaaatacgaaaacgtagatgttaaaattctagtcttaatatgtacagacaatttctggatagcataatmtgtaaggaaacagtggaaaaggtgaaaataagaggtcaggagttttgaaatgatagtttgtgaaatgacaggtaaaactaattattttaaaattgttttg

SEQ ID NO: 38572 - DNA, 201 bp, Bos taurus
agcgacttagcactagccaagcaaacaaacaaaaacaattagaatatgggcaaaatacaaaacagaaacttctccaaagaatatacacaaatggccaaatrgatatgtaaagatgctcaacatcttcataaggtacatgcaaatcaaaaccacaatattacttcacactgattagcatggccatcataaaaaaaaaaggac

SEQ ID NO: 38573 - DNA, 201 bp, Bos taurus
aacagactcaaaaaatcagtaaccatgataccatccttgattcctttctttcctgaatgttgcaaaagtcccccaactggccttcctattctgcccttgcyccctctgcagtgtatttcaacacagcattcaaagtgagcctactaaaatcatgtcatattggtcttctacaatgaaagttctttgtataatccacaaggc

SEQ ID NO: 38574 - DNA, 201 bp, Bos taurus
cttataatcttatctggctaaccataaatcaaattatgaagcatttcgatgctatacatggtatcctcataaaatatatgagactagtagttggcaaattkgatttctaggttctttcaaaccaattacagagaaaatagagctagaccttttcctgaggcaaaacgctttaagtctctgagttctagtttccatcctgct

SEQ ID NO: 38575 - DNA, 201 bp, Bos taurus
tagcagaagcagcttggccatagtcacagcagcagtgttctagacacaaaattcttgctttttaatcttatggtgtggtaaatatttattggactttgttkgccattcagttctatcatgctgttttgtaaccttagaaatacattataaatttatttattatgctaattgtaatttttgtaattatccaaaaagtcagaa

SEQ ID NO: 38576 - DNA, 201 bp, Bos taurus
ggttcacaggaaggcagtggctggccccaggacaacagcttgaactcagggccacttgggagatttgaggcttggagggcctggaagacagcagtctaagrcggcaccagagagctttgaagcatgtaaggcttccacaggctgggctctacagccggtcaaggccccacactgaacatctccagatgggcctgcatctca

SEQ ID NO: 38577 - DNA, 201 bp, Bos taurus
cggcagccgcggccgcggccgcagcgctggtggctggcagagccgaggccgccgctgcagcggccgccatgtaggtgtagggataggggaagaggcctccraaagtgggcatggggattccctgaaagaaacaaaacaagacaagggttaggcatcccgcctggggtgttcctgggggtgatctgggtgctggtggccggg

SEQ ID NO: 38578 - DNA, 201 bp, Bos taurus
agaattttgtatatctggttccaaatggttaacagttagtaatggatttaatttaatttctgggtggcatgaccgccaaggccatgtgtctggtgccttcrtatcagtgaaggttttaaggaaataaacccagttcgtggatcagtcgtcctaggccaagcctagccaagacactggtgctggggtcgaggtctctgtggc

SEQ ID NO: 38579 - DNA, 201 bp, Bos taurus
ctgaacccttgactcagtagccacattctgcctgcagtatcaatctaagtataatcaatatctctatttatgctggaaagatcatatcccaaggccaatcrtttaggaaagattatttatcttggttgcttattaaagatgatgtttgaattttatagattcataactttatacacagggcataggccctctaaacagctt

SEQ ID NO: 38580 - DNA, 201 bp, Bos taurus
ctcacaataataatgccactaataatagctattaggaaactgaatctctttttaaaaagacagctttatcgagctttacctgacacattatacaaaccatycttttgaagtgtataaatcaatgtgcatcaagtcttctaatacataatttaacattatccagcaccctttaagggctgtgacgacgtaaggttctagggt

SEQ ID NO: 38581 - DNA, 201 bp, Bos taurus
attgaatccatatattgtatttacgttctctgtcaaggttgcttttccacatttgagagatcaaaggccaaaacagtcatcaaccctgtagccttcaataytgtgttcattacatttaatcaagtgccaactccatggtatcattcaccaaccttaacaatatttaaatgcatggcattgtttagcaacaaatgtaggcac

SEQ ID NO: 38582 - DNA, 201 bp, Bos taurus
atagggtgataactacacctaatttggataattttgatgaggagatgtgaactttgagtctgatgatattttaaagagattttactgttaagaactgatgytgtaatgtgctgagatttccagggatgtttgtatggggtaaacgtattttgcacgtgaaattatcctgaatttgagggttcagagagggtggactgtaat

SEQ ID NO: 38583 - DNA, 201 bp, Bos taurus
aatcacacgtaccaatgagcactactgtcctcacaatctgaagaatattacaagaatactcacagaactaatctggactgtaaagtgctgaacctaagacyataatgtatgtgtcagataatctactgtgaccaaaacttcaaatgaacatggtactgattctgttctactgcacagagatttgccaaaggtcactagtca

SEQ ID NO: 38584 - DNA, 201 bp, Bos taurus
ggccacctgatgcaaagagccgattcactggaaaagatctgactcactggaaaagatactaatgctgggaaagactgaatgcaaaagaagaagagagtgtsggaggaagagaaggttagaaagcaccactaactcaatggacaagaatttgagcaaagtctgggagacagcattggacagaggagcctggcttgctacagc

SEQ ID NO: 38585 - DNA, 201 bp, Bos taurus
aatctgaatctctatccaaaaatttattgaacatcgtagtatttaagattctttgattggtgttggggtacagattaataaggtcgtttctttgttctcaygagcagaggggcgatacacaattaaatcaatgaatacagtgtaagttgtattatttaaagggtgaagcattgaaaaattgatgctaagtaaatggcgatg

SEQ ID NO: 38586 - DNA, 201 bp, Bos taurus
ttgaatgcatatttttggctactgagggaaataggaatataagaatatcttggcacaaagacatctcagttcttaaaactggcattttagagcccacataktcttaaatgtagctacaagggagcagttgcatatgacagcgccttgcagttctcttagtttggctattgacttccctccaggtttatttttaccagtaac

SEQ ID NO: 38587 - DNA, 201 bp, Bos taurus
aggtgtcactcactggaaagtaaagttctttcttgttttttgtcttttattgtgggtccagagcataaatccttcttacaggttctccttttgcttttttytaattatagcagaatataacggttaatctttgtttttgcttgtctgtcctattgttaggttggtgcaaatgtaactgcggtttcagaccatgaattttaa

SEQ ID NO: 38588 - DNA, 201 bp, Bos taurus
gtggagatgggactccacacttccaaagcagggggtttaatccctggttggggaactagggttccacatattttgggggaatggcccaaaatagtaataakaaaataaaaataaaataataaaaatagaatcaagcagaccagagttcaaatcctggttctgctatttttctggctgggcaccttttgggaagggacataa

SEQ ID NO: 38589 - DNA, 201 bp, Bos taurus
tttataaattatatttatttttaagtaggcattgcattcacatggctcaaaattcaaaagacactaatgacgctatagaaaaaatcgtcctttccaccccrtacccctgccacccagttccctgtcccataggcaaccagtattgtcagcgaaattccccccttgttaattacttagttgccttaggtgacaaatccgtga

SEQ ID NO: 38590 - DNA, 201 bp, Bos taurus
agtttgcacatgtgagttgctttgaatgtttgttatgcttggactgcacctgactttagtgtgaattctttggtaatttttaatgagctttcatgtaataytgattattttgcttggcgttgagtctcagatctaccaggttctgtttttcttgaggctgttgagtaaatctgcctccggctaaatccaaaatgctgctat

SEQ ID NO: 38591 - DNA, 201 bp, Bos taurus
gatcttcccaacccagggatcaaacctgcatcttttgtgtctcctgcactggcaggcgggttctttaccactagtgctacctgggaagcgacttttaatgwaaatcttacagccaaggggtctgggatcaagggaaatctgacgaatctcaaacatacatacaggaaagggattcagagacttccctggcagtccaatggc

SEQ ID NO: 38592 - DNA, 201 bp, Bos taurus
ctggtgggatccataagttacagtgtatcaaacttgtttaagccttctcttctgaaactctctccactcctttagctctaaatcccaattcaatgacactracctccccatcatcaccccacaagctaatcaatttctcataccctctcatatcagtgtagcccaactctaggaaaaccttgaaatctttctaaaagcaac

SEQ ID NO: 38593 - DNA, 201 bp, Bos taurus
agcagtgggccgtgaatggaagtgggttggcagggcaccattcagattaggaactggcttcattttcctctcttgcttttctcttttcagaagctcaggcrgaagccaaaaggcccatgttcattcaaaaccagactgtggctatcttgcagtgtcttggttctgggagcaaagtgaaagttaaccttgtacattcagaaa

SEQ ID NO: 38594 - DNA, 201 bp, Bos taurus
gcattctgaatttctccatttccttccttccttcttctcttcagggaccctatcgtcctgcgaggggacgaggtggaccacagcttagattacagaactgygacagccagtctgtctggaaagggcattgagtacaacaccgattcagggaacttcgagtgcatgtggattcaagatggtccttcagcttttctctgtgca

SEQ ID NO: 38595 - DNA, 201 bp, Bos taurus
tggcctaaaacaacacagatgtattctcttacctttctggaggtcagaagtctgaaatgggtctctaccgggttgaaatcaaggaatctgccttccttttytggaggctcgaagggaagatccattttcttgtcttttttttgacttctagaggttgtgccacattccttatctgtagccagcaatggacagtcaaatctt

SEQ ID NO: 38596 - DNA, 201 bp, Bos taurus
tctagggcctgagtctctgaaatctgccacacagaaggcaggaaaggtcaaggcaggcctgagtcattaccgtttttttgtgtgctttctgcctaataacraaataacacctgaaatatctagcaatgcctaatatatccagcacagtgccgaacagctagtggaaaatcactgacaacttccctcgcctgccccatgtct

SEQ ID NO: 38597 - DNA, 201 bp, Bos taurus
gatagcaacagcaactactaaaataactgagtagactattacaggcatagaatatttgccttgaatttatccctcatggagtgggcagagttgcaggttgycgatcgatggtgctctgatagtggagtaggtaggggcatactttccagtgtatgggctggtgtgtcttaatttggggtttcctgtactgcctaaagagga

SEQ ID NO: 38598 - DNA, 201 bp, Bos taurus
acttccagggaacagcgaggagagataagaaggcttcaatgaacaatgcgatcagaggaaaacaaaagaatggttaggactagcgatctcttcaagaaaaytggagattcaggggaacttacaattatgtccacgtcacctcggggagggaagaacaggcataggagaaagcactgttctacttttaacttctattattta

SEQ ID NO: 38599 - DNA, 201 bp, Bos taurus
agagcatcacccacccaaaggtgaggggtgctggaagtggaaacccacaccacgggattctctggcttttcctggaccctttccaagtccatcatggaggyggcaacggccttccgcctccatctgctcaatttcctcggaaaacaatcaccaacgggatccactgtgctctggaaatagcgatgctcatgaaagaagaaa

SEQ ID NO: 38600 - DNA, 201 bp, Bos taurus
agaattctatggacaatacagtccagggggtcgcaaagagttggacacgactgagcgactttcactttcaaaagtagaggagggcattcgagtctcagggmacacctacacaaaggcacagaggccccaagtcacatggagagtggtaattactctggtgcacatggagtggttgacattttattgacacctagtctggcc

SEQ ID NO: 38601 - DNA, 201 bp, Bos taurus
atgggaacctgcacttctgggaaagtaagagtaccataaggttccagtgtcattgagtgcaatcccagctccagctccagctcctgcttctatggccctgmagccactctgccttggaacatcggtgaatggatgcttctccatttcactactgctagctctcctgcccagaacccttacatttcctaaacacactgaggc

SEQ ID NO: 38602 - DNA, 201 bp, Bos taurus
gggcacttgagttgcttccacgttttagctctcgtaaatgtgactgtgcctctgttacttttatagtcaaaaaataaatggaaaaatataaccgggccacytccacgtacatgaatgctcagtctgaggtagtaactggcacttccttgcctccacccgccctgaaccgaagctgaaaaccgcctcctacccagaaccagg

SEQ ID NO: 38603 - DNA, 201 bp, Bos taurus
gataaagtaggtttgtggtctggttgtcatctggccctccttacagtggagtccacagatcagacagtgcgttacctgtctgggagcttgatggaattgcrgaaccctgggccccccagcccagagcttggggatcagaacccgccatttaaggacacctttcaggtctgagaagcagtggtgtgacgaggcacagcgccc

SEQ ID NO: 38604 - DNA, 201 bp, Bos taurus
ttctttcttgtcaagtgaacacacaggggaagcaaggacttcatcttttgttttctttgtctagcaccactgccagttctagcctgtcagggcaaattcartaataattaatagctgttgatgagccagttgttctagaatccatttttttttttaataagctgaccaataaatgagacttgccataaatttaaggattct

SEQ ID NO: 38605 - DNA, 201 bp, Bos taurus
cctgtgtctcctgcttgacaggcagattctttaccactgagcctcacctggaagcccagctaaaagcaacagagcacagttacaactgaaacagcagtggrtaacagcagggagacaagttctagccccactgccgatgctgtgtggcctagggagccctgtttcttccctgggcctcagctctctgtcagtgcaggaagg

SEQ ID NO: 38606 - DNA, 201 bp, Bos taurus
aaagccccctggcagcaatatagacccagcacagccaaaaacaaatacgtgcatgttaaaaaaaataaatattaagcttgattagagctccaaggaacccyttaatgatctttgactcagatgccagatacagttgaatgaagtgtgaaagctggcagttgcctgaccttggagaagtgggagctgccaccaaggagaagg

SEQ ID NO: 38607 - DNA, 201 bp, Bos taurus
cccatggatttgaggggcctggtggtctagagtccttggggttgcaaaagagttggacacgatttagtgactaagcaacagcagcaattttacatcatttmaacatcatagcattgaatttttatgtacatgtctccttggacacacgtgtgagagtgtttgtagagattatacctagaaatggagctggggtttagagct

SEQ ID NO: 38608 - DNA, 201 bp, Bos taurus
gttcatggaattctgtaatctactgggttgcctaatagatttgggtgtttccataacatcttatgggaaaagctgaacaaaatttttagccagcccaatcrttggtggcttatagatcagtgtcttcccttacacggtgaatcctggaccatgtgtttctctttcctgtctgtccaacatacaccagggcctgcctcagtg

SEQ ID NO: 38609 - DNA, 201 bp, Bos taurus
ctccccaggacctaacgcagggcctagaacctacatagtgtccattgttcgttgcatgaatgagtccaaactcaaatcctggtgttcagacaagaaaaccraggctcatagaggggccgtgatttcccagggtcacacagcaagctggtagggaagctgagtgccttctgggctactgcctctctcactgaatcttctctg

SEQ ID NO: 38610 - DNA, 201 bp, Bos taurus
ctggccgcccgcacaggaggaggcaacagggatttggaaagagagatgaggaaggaggactgtgcttactgcctagaccacaggggataagactcttcacrtggccagtgggataggaattctaaagtttccatccattgtcttcccaacagccctctctctcccttgcttctttcttgctatcagaattcagatactagc

SEQ ID NO: 38611 - DNA, 201 bp, Bos taurus
agggatggagagtgaggctgagaagattcaaagggagggagcagggctggggtggagactgaggagcctagaaacctgagaggcctggggtggtaggaagkttgaggtttgaggtccctgcctctgatcctgaggtcactgcctgagctcctgatgagtctcatttatcagcaagcttaggatattgtttgcaatcctgac

SEQ ID NO: 38612 - DNA, 201 bp, Bos taurus
aaagagaagttgatatttaaccattcccataccaatctctcatagttttatttatacaatactaagaaaacattttaaaagggaaagatattctgaaaccrttttattctaaggaaaacaaaatttctgactctctccaactcgggaactgactatataacaaaaatataactgacaataattggccatctgaaattttct

SEQ ID NO: 38613 - DNA, 201 bp, Bos taurus
catttccatagtaaccaaagtcaggccagtgccctcactaagagtagctcccgcgtgtgaattagtaagcttaaattccaaagttgaactggcacctccaragagtgagataaaaaacactttgtatcaaagctgtgattaaaaaaatgtaaaagttaaacccacaggcatagagaaaaacgggcaatcctgaaaactgcc

SEQ ID NO: 38614 - DNA, 201 bp, Bos taurus
tagctttgactagacggaactttgtcggccaagtaatgtctgctgcttgtccccaactccttcctctccaacttccactccagatgctccttgggaaagcycagcaaagatcctagaactcacattagcactagaagtaaacctggagacattcccgccaagcctgttacctgacagggacatggaggtcctgagaagtaa

SEQ ID NO: 38615 - DNA, 201 bp, Bos taurus
aaaaagcaccctgccctctggacccagggtttctgtgcaatgggggtaggacagaacagtgtctggagttcacaggctctgtgacaggaacttgctcatgyggcccagccaggagcaaaatcaggacaaagtgcaggagccccaggtctgcccttgactcccaggctgcaggcagaggaaaaattcaagtctcagtctgtg

SEQ ID NO: 38616 - DNA, 201 bp, Bos taurus
attcctgccagtcccacctcactccaggcagtcccgcctcctaggaaggatcagagggatgtcggtctggatggaaatcactttcggatactgctggcccrgctgtggaccaggggagtgggcctggctcagcagcgccacccagtggctggtagcagaggcgatgggaggcagggcgctggcaggagagcagcagttgtg

SEQ ID NO: 38617 - DNA, 201 bp, Bos taurus
tgaactgaagggtcttgaggagcagtgtggccccgcagacactctcctccgtgctctttctgcagtgagcacagatgatgctctgttcggcttctgctctygcaggccggaggtacccactgatgctcaagccttgtactcccaagcgctctgccgactcctggcgggtgcagaggaacttcaccatcaaatactggaaag

SEQ ID NO: 38618 - DNA, 201 bp, Bos taurus
tactacaatccccttaggccatcctggaaggcagttgatgcagcatcaggcaacagcacaaaggtctgtgctacagcaacatgcaaagacttatccagcaytgatatccagaacggcccagccgaagctttccacagctctagtaaaggttagagagatcgacagctggctccccgagtgaacagactggaagctcccact

SEQ ID NO: 38619 - DNA, 201 bp, Bos taurus
ccaagaggactgagcagatggtgggaaggtcctgctgggcagcaaggtggagggcggtctggcggtgcttggttaattcattcactttggcacctgcaagragctgatgacgttgattacatgagcagctgctctaccaccaccaaccaaggtctggcataagggggcaagcctgccaatctcctgcccgccagggtttgc

SEQ ID NO: 38620 - DNA, 201 bp, Bos taurus
tatttaaccaatcccttcataatctggcctgtcacatacttttccaacctcagatcctgctattccttccactgagaattgtgacctcttcccaactcacrtccaaaagaggcctattttccaaagcccagcccagagaagcccagtttatctcctgcagtacaggcttcccgacaccccaaacactccccacaccccaaa

SEQ ID NO: 38621 - DNA, 201 bp, Bos taurus
tgggatctcagtcttaacctctgggccaccagggacatccctgagtgattgccctgttaacatccattgtagatgatatatggaattctggcaaagtaaaycccaagggagaagattcaaggcctaggcacacatggggttgtgtatgccctgcggatacacacgcacactcacacatgcacatacgttgcaaataatcct

SEQ ID NO: 38622 - DNA, 201 bp, Bos taurus
gctgattctgcagcaggcccgcatcacgcagttgggattacaaagtatcctcacaccatacacactctctgtcttcctccagaggataagagacagtcacrtggccccagcctgccctcctccctccgtctgtctcttctcttaggggcgcaggcctgtgagggaccagccagcccctgtgaacgtccaacttggcggtca

SEQ ID NO: 38623 - DNA, 201 bp, Bos taurus
tcaaaacatgattcctttggtggaggcaaacgtccagggatagaaatcagaccggtagttgctaagggccagaagtaagggctgaggcaaagggcacaacraaccttttcagtcgtcggaaatgttctttatcctcttcatggtgttgctgctgctgctgctgctgctgctgctaagtcgcttgagtcgtgtccgactctg

SEQ ID NO: 38624 - DNA, 201 bp, Bos taurus
tgtctgcattcctcactttgggaatcacatattcaaagattggtccaaacatctcattttcagtgggggcagtgaggcccagagggatgaattcactttcrgaggtctagtttctcagtcagtgggaaggtcagtctggtcaggagagagaaaagagaaaataaaggaatcaaagtcttatcagtctttacatttttggag

SEQ ID NO: 38625 - DNA, 201 bp, Bos taurus
cagcattgaatcctgagggaggggccaaggatccagctcccccgccttcaggtctgaacacatcccaggatacggcggctttttttcaagagaaaagtctrtgagacctgagaggtggccgtaacctccaggcccaggtccttcctggccagtgggcatctctggtcagcttggctagccttgaccagcctgtttctactt

SEQ ID NO: 38626 - DNA, 201 bp, Bos taurus
tcacggatgctttcttccctccctatccaccctgacagctatgaactcacaatttcctccactgatttcatcatgagatgggagacaagctgcatcccaargctttattgctctgcggcaacctctccttgaacaaaccatcatcttgcctcctcccagccttttccctcttcttactgtgtcctgagtgtccctgaaaaa

SEQ ID NO: 38627 - DNA, 201 bp, Bos taurus
ctggagcatccttttgttttttaactttccaccttatgtcactgtttcttttgtctgctgcttacatatttccttacctgatggccagttccttgtcatgrgaaatttgtttcaagttgtgcttttccctagtatttagctaatgatgtgaatagagaaggtcctcaataaattggtcagtaataagcaaatgcgagtggg

SEQ ID NO: 38628 - DNA, 201 bp, Bos taurus
acggagggaagatgatgcataaaaaggacccagcataggagctcgcctactcctagctcttaagacctttcatcatagaggtaggccgcagaccaccctcyggacactcagagcatgtgagagtctggttcctaaaactcccactttggctccccctccaaggcctcaaaagctcaggatcaagcacaggttggaagcccc

SEQ ID NO: 38629 - DNA, 201 bp, Bos taurus
actgcttgtgggaatataattttgcacaaccattttagaaaagagtggcaacatctatcaaaggtgaaaagatacataccctgtaaccagcaatccggtcytggacatcagaccaacagaatatacatctatgtctgtaatgtataagagtggggacttttctggtggttctgtggtggttccaatgaaaagggtttgatc

SEQ ID NO: 38630 - DNA, 201 bp, Bos taurus
cttcctatcaccctggtgacacttctctaactggccctccaggagattgtgcaaattgttgcgtatcttgctaaaatcaagagacactgatgcacaccacrgaaagggccctgaagcagagatggaaacactaagttgcagtccacaccttgtccctgggctgtgcaagcctgggccgatcccatctcctctcttagtgtc

SEQ ID NO: 38631 - DNA, 201 bp, Bos taurus
cagccatggccggaaatgccctcctcagcccacagctgagagaaagggaaatgctctgacttctcgcttcccccccagtctccaaccttctgccaaaaatrgaaagcagtgccaaggggcctgagaaacagctgcaggagaaaagcaggtgtggatctgacagcaagagacaatgaccagcccagggaccaagggacagac

SEQ ID NO: 38632 - DNA, 201 bp, Bos taurus
gcctggcaggctatagtccatggggttgcaaagggtcagatatgactgagcaactaaacacacacattcttaaatacatatgtgctattagggttcaacaygcacattttcagtagcccctggtcactataccatcaacaactagaggaaaattacttctgatctggaggaaaggggaaggagaatttttaacaggttcac

SEQ ID NO: 38633 - DNA, 201 bp, Bos taurus
caacaagagggcatacttggaagagtggagctgtgccacatcatacccacaggaagcttctgtcactacagaaaatgagcacaaggccattctgggtcacrggagaagccatcctgaactgccatcagctaccacactgggctctgtgggggcagccatcttggatgacttggggaatatagcctcagctgccttggcgtg

SEQ ID NO: 38634 - DNA, 201 bp, Bos taurus
gagtggagcagagactccaagaggaggcctcaccaactgtggaggcagcaagggtgtgtgtatgcatgcgcacgtgtgtccacgtgggcacacccgctgcraggccaaactatgtatttatatccaaatcagatagacagcacaatgggcctcactataatttcctgcctgtatttaagagctgaggatagttcatttggt

SEQ ID NO: 38635 - DNA, 201 bp, Bos taurus
atccgtaaagtgggaacacttacagctacttcatagcgttgctgtgaatggatatgtgtaacccactcatcacagggcctgtcccagatgaagtatctaayaaatgaaagctaattttattgcatgtcaatcattatgtaagaggagggccattatatcatcccacaccctgtggatggaaaggactctgtcttcttaaaa

SEQ ID NO: 38636 - DNA, 201 bp, Bos taurus
agttaataaaaataaaatggttgaggcactgagagatgctgacacaatgctcccaactccaggggcagcaaggccatgctttttcagcacctgcagaacarcgtggcccaagcacgtccagggggctgagacagagctgagggaacagagaaaggattcccctggtagtcgggcggagctgagtagtctttcgggttaccc

SEQ ID NO: 38637 - DNA, 201 bp, Bos taurus
ccggtcctccatcttccccactgcagctaacatgactgtcctaaccagcaaaaatgatcacttcctgctgtggatgttgcattcaatcctgactttccagyacttcacacaccggcatatgataatcaataatgcttcctgggtgatacagggaaattactgaaaagtccaggaggtcaacacttggacaaacctactaaa

SEQ ID NO: 38638 - DNA, 201 bp, Bos taurus
cttactggggtaaaaagcatggtgttatgaacatatcgatgaaaatggtctttttttccccctagtctacaagttcattacaaaagagtgagaaatctttrtcctctctccataataatttttgctggcagtctaggctgcttttactcccaaaagaaaaaggtcacaggccattgttttacagagtccaagtcacaagtc

SEQ ID NO: 38639 - DNA, 201 bp, Bos taurus
taccaccactagtaaaaaaaaaatgaagtataattcacataaagtgcatatatttcagtctcttttgacaaacgtatacagctgagtgacccttactcctyccaagatgtcgtttatttgttttattccagaggagccccactgccccttcccagtcattcatcctcagaaagaagcactcatctggctttccactcagca

SEQ ID NO: 38640 - DNA, 201 bp, Bos taurus
ttaaaagaattcgtatttagacagagggcatgttgcatatgcaggacttgaagaaagtatagagcaacgagagtaaaagcagcgctataggtctgatggaragatggctctcagggttaccaagggatgctgattgctaagtagggttcagaggattctactgggagccaagagcccactgtaagaaggtgatacagaaag

SEQ ID NO: 38641 - DNA, 201 bp, Bos taurus
catgaagggtcagatcatacagagaagatccatacctgttcagactgaaggaagtggggagggaatataagatgctaatgctcggccatcaagagttctgytgggcagaggaggctgacagcccctgggggctagcacagtcagttctgggctctctgagtcgctgtgcactcaggccctgtaccaagtaaaccccaacaa

SEQ ID NO: 38642 - DNA, 201 bp, Bos taurus
ttgggtgcagttcaagtacgagctcaacacctcgagggccctccactaggtttaccaagaaaccgaatacctttattgggtgggaaatggagccccaactrgcatctggccagtcgggagtggggacctccccgggggacactgaacacccttgtaagcacactgccctaattacggtgggcatttgagggcaggggggtg

SEQ ID NO: 38643 - DNA, 201 bp, Bos taurus
ctgggccctggggccggcctccccatataaaatctgccagtcacaccggagcgggcaccagggtattctgccattttcagtgtcgcagactggcccctccragagctgtacttccaaaccactttccgctggactggatcgcgggtttatttttaaaaccgtgcccaaaccatagaccagaaaaagaccttggccagtcat

SEQ ID NO: 38644 - DNA, 201 bp, Bos taurus
taacagtggatttaaaaatggcccctaaagacttagcgttcatcatccgaaggctgcagttattcctgaggataaaataaccctgacctgaaacaccaggytaacgggccagagactgggatgctcctgggatgagaggaagctgagactcatctctcataagggtcctttgtttacccagggccctgtgggggctgtccc

SEQ ID NO: 38645 - DNA, 201 bp, Bos taurus
cagtattggggtctggggttgggtggtggggaggaagcagagctttgactcaaatgtaaaattcaagttttaaatgagactgaattttctggatgcaaatragcctattttatcaaagaaaagctaccaaattctgatgggtttatggaaagtgggatttgatagagcatagttggaatcagttataggaaaaataaaatt

SEQ ID NO: 38646 - DNA, 201 bp, Bos taurus
ggcccatccacagacatttccatgagacaaatatttgggccagaccgttcttaggttgttttttttttaagggaaggcaggagatgacaaaaggattttcrctcctagatggccgtgcgcttcacatacgctctatcagcaagtgatgaagctcatcactctaagcgaataatcactcacaccaggcattcccgctccgga

SEQ ID NO: 38647 - DNA, 201 bp, Bos taurus
gatgatctaagttctgagggtttccagagtgtgagaaaggaagcaaacttgcgatcatcagtattcatgggccagcctctgccggcccacatacaaccctygctaagctttggttatttctatgtattcctgtacatcctccacttcattctgaaacccagtccaggaagctcacctttttcctacccacacaggcctaca

SEQ ID NO: 38648 - DNA, 201 bp, Bos taurus
cgacccattattggagcacatggacacacacagctttgtggagttttgaaaacagaaaggacgttgaggttcaattttagacatgggggaattgacccctraattcctgaggaagtctgattaatgctgaaccgttagcgagtgcaaaggttggttttatttccactctgtgaaaatacctctgtcaagcatgccacctct

SEQ ID NO: 38649 - DNA, 201 bp, Bos taurus
ggcccaactctcacatctgtacatgactacatgtactgtgtattgcctacattcctatcctcataataaagtccttgagggcaaggctggtgtctgacttkctttctggccccctgcatcccttctaatcaagatgtgccacctggagtacactccccatttcagtgagccagacaggtctgggcatgtccggcctccctc

SEQ ID NO: 38650 - DNA, 201 bp, Bos taurus
gctcacagtcttatgcaatgggccatagtgatagataatataggacaaaatgagaaatgccagaggagcggagagaagggggcccaaaggagaggtcaccrttgagttgagctttgatgtatgcataggagtttgctggctgattatcccagaaaacattcagggtagagccgctctgtggaaaaggcccagaggcccaga

SEQ ID NO: 38651 - DNA, 201 bp, Bos taurus
cgaattagcctgatgacagggctaccttcatctaagtggtacatggtcaaagtgggttaatccagctttagcttaagctggggctggttgcagggttgtgrggccaccccccatcagggagacgcccgcttcctctaattcgctgtgaaggaggagtctgttgccctttctggctcgtgtgagtttatatcatcatttcta

SEQ ID NO: 38652 - DNA, 201 bp, Bos taurus
tgcacacagccttgtgatcccagatcctgtgcaaggttaactagccttctataaacattaacacccatgggaatggcgtgccgtgattatcctggcccctragtacttggcagtttacagaaggcactctacagactggagtgcaaatgtaatttgcgttgcaatgtttattgcagtcacagttctgtaaacaggctgcct

SEQ ID NO: 38653 - DNA, 201 bp, Bos taurus
tgtaactcgtcctttggtgaatttaaacaccctcctgtttcagctttaggttcaatataagcaaaccccgagacaaggtagtttgtatgggaggtggcccrggaagcaagaataataggggaagaaaagtgactcggggaagaagaaaaaaagaaaaaacactatagggccagcaaaggcagactaattcctcaggggctt

SEQ ID NO: 38654 - DNA, 201 bp, Bos taurus
ctagaaaactgggtgggttcttttgttaatgtgcgtagatacggccatggagagacatcttccatgtctcctgacatgtggaaacaggagtttggccgttkgattcacagataaatcatcttcaaattgtgttattctttctaatgacagacgcgcacaagaaaacctgctcactaggtagttgtcattattcccactaca

SEQ ID NO: 38655 - DNA, 201 bp, Bos taurus
tcaaggctatctggagaggcccccttccctgatccatggcagacgtcagcagtggatcaggaagaccaggatgaactgctttcaaatcctccagaaaccaytgggcctctctaaccttgtcttcttatcttcagaatgactgggggagattaaaggagccactcttacaggccctccctctttctgtggtcctagagcagc

SEQ ID NO: 38656 - DNA, 201 bp, Bos taurus
tggaggctggctcctggaggtgacccacttcggcctcctgagaaaagcctcctgctctcgctcaagccctgctgtcccatttccccttcagcctcaaggcrgtcctggccgggagccctccggacaacaccgtggacctgtcaggcatcccgctgacctcccgtgacctggagcgggtgaccagctacctgcagcgctgcg

SEQ ID NO: 38657 - DNA, 201 bp, Bos taurus
ggtgtggctggttgagggggatggaaagaggggaccaggcagccaagagagtaggattacggaggagcaggggcaggtgagctgacatttaaagaaaaacrctgttgaccttgagttaataattagtgaggctgaatgatgggaacatgagtttcattatactctttgctctacttttgcatgcttgaaattctccacagg

SEQ ID NO: 38658 - DNA, 201 bp, Bos taurus
tccttttccacctagaaagaaatcaaggtgccatggtcacctgaacaggaaagagctccccccatgtccacgctgggcccactgatacaacagcaaaggaraccttgggcacgtgtgtgcccagcaccatctctatgttctgggcttcaaaaacagccaaggcagagaagtgtgatggatgtcagtggccgaatggatgga

SEQ ID NO: 38659 - DNA, 201 bp, Bos taurus
ctgtaagcagtcttgagatcttcctggtctccacaagacccaggatgcaggctgggcaactccgccagggacctgcgggcccacgcactcatctacacttmggcacaaagatcccaagacagccccacggttgtaccaccctgcctggatccccacgaaggccacacgtgcaaagtgacggacaagcagaggggcggaggg

SEQ ID NO: 38660 - DNA, 201 bp, Bos taurus
ggagagataaaattagcctacttactagatattctaaccaaaatctttctgacgattgacaaacccgaattaactttttggccaagccagtagaatgctgktttttttttttgtttgtttgttttttatttatttatttttttttaattattaatttctgaaccctcctccctctgccctccccataccatccccctgggc

SEQ ID NO: 38661 - DNA, 201 bp, Bos taurus
taggtggcccctactgtccgtctccttccttccttcctgccctccatacactggtgtccaagctggaggcctcgccacccactgcaggtcatgtctggttmacagaagtgttgaggagtctctgagttatttcagtgctcaatttcactgtgtgagccaagaccggaggttctgcagccttgattttaaagatacttgatt

SEQ ID NO: 38662 - DNA, 201 bp, Bos taurus
ctggtgaccccggccagccccctgcaggcacaggagtgccctctagggtccctccacaggcacatcaaactggaccctgagctctcagacctctcctagcrtcccagtgacgcggcccatcaccagtcccaacaaagacttggacttgggccccacccgcagggcacccaggcaccaagtcccgggcccatccaggatgca

SEQ ID NO: 38663 - DNA, 201 bp, Bos taurus
gcccaggaagcagtcctctcgtgggcccagaccaccttcctggtccccgaggtcttaactcctcaggagctgagccccactgtggtgctacaaagcatgtrggtggaggccgtgtgcagcagagggcggggcacgaggccaggctgcccccacaaggcctctgcagccatggtaggccggggcgtagatggcccccaggac

SEQ ID NO: 38664 - DNA, 201 bp, Bos taurus
gctcctgtccagaacagagacactgccctgaggcgggacgcaggcagtccggggctggctggagtcctgcactgatttgccatgtgactctggaaaggccrtgtccagcccgtttactcctgtaacgagggcaagttgaacaagttcatttctacatctgaagcttaaggccggaatcaaaggagcttttagtttttcttt

SEQ ID NO: 38665 - DNA, 201 bp, Bos taurus
gggccaccagggaagtctctcagcttcaattcttgatactgaagttactttttgaagtctgaagcccacctggtgccaggcagggttacaccttcccaggyggacaggcctcacccactgggctcctgaagtagacacctgtccccagggctccttggaagattcgaccccggaggctgtggcttgccggggtgggggctt

SEQ ID NO: 38666 - DNA, 201 bp, Bos taurus
gggcaggccttccctttacagaggaacttgctgctctcgagagactgagagttcgcttccctcctgggtttccgtcccgtcttctatcagggtaccgaaaygcgtggtttcaaggcctcccctcgggctgtggagggtagagcctggcgacagtgtggacgtgtgaagacagaagggcagccccgcgccgccagaggacgg

SEQ ID NO: 38667 - DNA, 201 bp, Bos taurus
actggatgggccagggatcgggagacttctgaaaagggccagacggtgaataactccagcaccgaagtcaggcaggctccaggcagccggggtgcaccagrgaaatgagaggatgcaatcaaaggcctagggccatcacctgaagacacctgggtccttgcaggaccctgtcctgcattcgggccctgagcctggagggtc

SEQ ID NO: 38668 - DNA, 201 bp, Bos taurus
taggcgaagagaaaacaaaagttcacgtcgacctaggaaaatggccgattgagtacatctggctggaccccaactccttagtagcctcccctggcccaccracattaagccctgggcttcaagggactatacgatcaactcatttccctaaaagatgaactaaaagtgcctactattgaaaataatctctttatccattta

SEQ ID NO: 38669 - DNA, 201 bp, Bos taurus
agtcctgtacacattctagggctctgaaaaatttagttagaaaactaaaagctagaaagaatacggaatctagcatcacagttcaccggcctttagtagcygctgactttgggtaagctaatcctctgaggactatcacttggctcaaaattttttgtaaaattctttatctttgtaaactatacactattaaagctgatg

SEQ ID NO: 38670 - DNA, 201 bp, Bos taurus
tttcacaatccaaagactgacagggcccaaggctagaagtggctctgcccagagacggcatatatacaactaacactgagcctcaggcggtcactgaaacrgcaggccgcttgatagaatttctcataaacactgctgcatcttcttgctcttaacccaaaggactgaaaaccttatcaactgaaagaaatatgtaatggg

SEQ ID NO: 38671 - DNA, 201 bp, Bos taurus
tgtcttagccacaactccaagcgtacaactcagtagccccgttctcttacggttcaaatatactgctgaccttgggttcgttcttgttttgtttttttttyctgttaggattatttgggggtttttggtggtttaaactctttaactttttccttgctgtgtatgaggaaagctaaagctgttatcaacttcttcttctat

SEQ ID NO: 38672 - DNA, 201 bp, Bos taurus
cgctcagtcatgtccgactcctagcgaccccgtggactgcagcctaccaggctcctccatccatgggatttgccaggcaagagtactggagttgggtgccwttgccttctccgaagttaatagttgagaggacctaaatattttttgtcactatttcttaagttattaaaaaaaccaaaaatagcttcaggccaatacaga

SEQ ID NO: 38673 - DNA, 201 bp, Bos taurus
aacctatagtataacatagagctagacttatttcatcttagtggttcttagtgtttctttgggtcatggattcctctaggaatcagattaaagttatgaarctctctagaaaatacatgtatacgcagaattttgtgatctgtttgtcttttgcttagattaggcttaaaatctttgacactaaagacaggtttatatagc

SEQ ID NO: 38674 - DNA, 201 bp, Bos taurus
tccagtggttaggactccatgctttcgatcagtccctggtcagggaactgaagaccccgtaagccacactgcgaggccaaaaaaaaaaatcattatttccycagaaaagggatcccagtggaaggggcagctccaacctgaagattcagaacagatccttttattaggccctttcagtggtactcaatgagtctcaagtcc

SEQ ID NO: 38675 - DNA, 201 bp, Bos taurus
tttggaaccagccttgagagggctggggaaggcaggggtgaggtttaagggaatatttgcacctgtctctggatcacagaagaggctgagggtgtgtggcrtagagaattggccctgaggcctttctcagaattccctgtacagttattcaaatactccttttgctcaagtttcctggggatgcctaggctgtggggctga

SEQ ID NO: 38676 - DNA, 201 bp, Bos taurus
gagatgaggactctcctggggtcatcgggcaggagtattcagtgtggcaccctgatcctgagcctcttgtcccttcctttcagggtgaagctggtcctagyggcccagccggtcccactggagctcgtggtgcccccgtaagtacagaagacctggttaagggcccgcacctggcccttctctccatgctgcccccagccc

SEQ ID NO: 38677 - DNA, 201 bp, Bos taurus
cagagagctctgagggagtgagctgaggtggctggactcttgggtgggcatgaagaagaggggtctcttgccagggcccagggtaaagagagggacatcayccagagaaagctgtgctctgcagtggcctggccagtcaccagcggggggcagggacccactctggcattcttcccccaggataagaaggcaccagatccc

SEQ ID NO: 38678 - DNA, 201 bp, Bos taurus
ccattggaattttaagtgctggattaccactccctttctttagagaggattagtgagggttggctcatccactatctagaggcatttatgattgaaaaacrgaagctctgccagattaacctggaatttgattgccctaaataactacagttggagaaacctgaattgggcaaatggagggccttgagtggatgaccaggg

SEQ ID NO: 38679 - DNA, 201 bp, Bos taurus
tcatctttgggtgctttttcctaggaatcctgttcaccggggagctctgggagttcttgagctttgccgaaaggtaccctaccatcgtctataacatcctyctctttggcctgactagtgccctgggccaggtgagtgccttgatgggtgatggcttggcttccccaagagagactggcctggctgggagaagagggtggc

SEQ ID NO: 38680 - DNA, 201 bp, Bos taurus
aaagggtcccagttctggagggtcctagaccccttctccagttcagagagtctacctcaggctcaaacatgcactatctgtgctctggccacagaggccamctctctgccacccacccagtcccaagccggcagccacagattaccaaagcgtgggaaccgagtgcggcctgggaggatgctttccaaacacttagcccag

SEQ ID NO: 38681 - DNA, 201 bp, Bos taurus
aatgacctgtgggacaaagagaaactaaattctatcttctttagtccactgtattttggggtctccttggtatagcaattcaaactctgctctaactgatwtttcagctaatacaagcactgaaaagctggctggaagcttcaggtgtgaacttccaggggtgagtttcactccaaggcagtggctctccaggtgtggtcc

SEQ ID NO: 38682 - DNA, 201 bp, Bos taurus
cctctcagtgggaaatgctatttccctctcccacgtccacaaccctccagctcacttacctccttcgggaatttccactgcagtcacaacagcacagaatkgagcagaaggttttcagggcctcaggaacaacccttcatttgggggaggaggggaggagacttgcccagcatcccacaggatgcaggtggtaaggccaag

SEQ ID NO: 38683 - DNA, 201 bp, Bos taurus
ggatctgcctcttactttactttccacctcacaaccaccactctactgttatctgaatctcctgtcatttcttgactgttgattgccagtgggtggggccyatttgaggcactgaccaatgactgagcaggaccagttgcctagtaacagggtgagtgatgatgctcaggaatggctgtgagctatggcctgcatgcaccg

SEQ ID NO: 38684 - DNA, 201 bp, Bos taurus
taaaagatgctttgttttacatccagcaaaaaggatcattaacacctcaactgttttttcaccaagcctgtggaaggctcctgctgctgttgataatcacrgtaaccctcagggtagcgggggcaaaggggtgggtaattcaccagaaaatggtattcgccgatttggattacgtgcaccgctgctcctctccattcatgt

SEQ ID NO: 38685 - DNA, 201 bp, Bos taurus
tggacaattagaggtgggctctagaggcctggcgggaggagggggtgtgagaagagctgaggattcagtcagggacacagaggcaggtggagagaaggggrcggaggccaaaagagagaggcttctgactccccagtgaacttgggaagggggaggcaggagaactagagaatggagcagaggcctcatggggagcccagc

SEQ ID NO: 38686 - DNA, 201 bp, Bos taurus
caaagagaatggatttcgactgagaacgttgtgcaggacccatggattctttacattcttggtgggtaggcctattctaaaggaatgcttcaagtaaacarctgtaacacggcgattctgctggctttcttaggcatttcatgttgcatgcaattagccgggcagcaacgcaggacagagaagtggccggtaacctcagta

SEQ ID NO: 38687 - DNA, 201 bp, Bos taurus
agactgctgccaaaggaatgtaaacctaaaggagcctcagaccctcccagagtcaatcctctctctcaggctcccaatcccttactggtctaaagacatcygagtctcatgcatcctctgttcataggagtgctgggcaagcctagggagaagctggcctggcccagcagactcgcagccttcaagctcttcctggggcca

SEQ ID NO: 38688 - DNA, 201 bp, Bos taurus
tttccagttggtgcaagttttcaattgcaaagtctgccagcaggggtcagcaaggcccctttactaagcacagagaagcctgcttttcttcactataaccrgtggtagtagtactccataaaacatattaatgaaagcagttgtcctgagactcttaagaactataattaacccaaagttctcttctctgtccaaaaggaa

SEQ ID NO: 38689 - DNA, 201 bp, Bos taurus
tgccaccagaggcaaagaggaaaaagtccccaacctggtacctcacaggatcaagaaccccatgcaaatgggtacacagcctcaaccccaggcccagagaygggcactgtcagtagggaaacaagaatctctcttttattaaagtccaactacattaacaaggaggagcagaagctgtgacttgaggctgaggggccacag

SEQ ID NO: 38690 - DNA, 201 bp, Bos taurus
ccctgagctccggccccacgcccaggtccagggctggtgggacgggcagggcacctttgactttgcccaggtcttctccctgagccagcagcctgtgcgcrtggaggctgccaaggcccgcttccgggccgggcaggagctgctgcagcaacaacaaggtcagtgagtagacagcgtggggcccagctctcttccctccca

SEQ ID NO: 38691 - DNA, 201 bp, Bos taurus
gcctgggccttccctacctctccagagcctctttcaccaccttcccaggaactctctttgttctagctgttctgggtttcttttggttctttcaataggtsaggttctctccagccacaggcctggcatcgcatgtgctgtttcttccatctagaacactcttccctgtcctctttgcctggctagcatcttttgagtctc

SEQ ID NO: 38692 - DNA, 201 bp, Bos taurus
gcagaacatagaggccaacagagaaagcagagtaataaagcttgcaataatttcactaggctgaggagataaaacttggaattcaggactaccaaagcagycagtcttcatatggccagaaaaatggaataatagataaagtctaacattcttcattcaacttcccctcaagatatttactgcctcctatattacagtagt

SEQ ID NO: 38693 - DNA, 201 bp, Bos taurus
ataaagggccaagctgcagctccccgcaatctgctctagctgcctgtgccccccctcaccctgacaccgtgctgctaaactggaatttgagactagggatrgcgaggggtgggccagagagctcaatagaaccataattggtgtgtgtacagactgtgggagtgtacaaaatctttttcatgtgtgttatctcaatgaatc

SEQ ID NO: 38694 - DNA, 201 bp, Bos taurus
gcccactctctgaggccagggttaaggcttccccacaggggagaggacagaaccccagtcagattcccagaactcccaagtgagagctctttggtggtttycttgagtggcccaggggcagctggtgcccttctgggggaattgtttttaaagtaaaggtccctggcatcattcccactcctggcaaggggctccatcttg

SEQ ID NO: 38695 - DNA, 201 bp, Bos taurus
agcttcctcagggccttcctggggacagtccgcccaccccacctctgttagtagaagggagagtcctggcatccttgtttcaacctgaggaaagcaagggmtccagttcagggaggctcgtggccccagctctagtggggctgtgccccacaccaacccagcacacgcttcctttacccgggaagtctgagcaagtttctc

SEQ ID NO: 38696 - DNA, 201 bp, Bos taurus
gaactccctgcttctcaggatagccttctggccctctcactctgggtctctgcaacccagactgcagattcaaacccaaacaatagactgcctgctaagcwtcaccaccctacgtatcacagacacccgatgtcagcaggcccagaacagttccttgtcagctccaccaccccaatgccactcctgaattctacagtgagt

SEQ ID NO: 38697 - DNA, 201 bp, Bos taurus
cttgactggtagtacctcatgtgacaaacactgatggtgtgcaaccactttcttgtccagatggggagactgaggcccagagtggggagttagagatggartcttgactgtctcccaggtctcttgcctcatggtactagtgagataggatggggcccaggccaatcagggtaagatgaccctggggaccactggccagta

SEQ ID NO: 38698 - DNA, 201 bp, Bos taurus
gttgcctcactccggggagccagaagacgcaggcaggataggagagaaacttggagaaacagttcaacaacgacctcccgagatctggtcccgggggcaamcggctaccactttcactgcccgatctagagcccacttccgggagggcgtcctattacagaaacagcgtcgcaggacagtgacgtttaatactagctgtcg

SEQ ID NO: 38699 - DNA, 201 bp, Bos taurus
aagttacacagtctatcctctagccatgtccccggccctcttctacctgtcctagggcaggctgctaagggagccttgccccaggggcctgtcgtgcccaygtctccttggtctgattttcctgagccccttctcagagggagccctgcttgccactgcagtaggggaggacggggttcctgcaccagggagagagagctg

SEQ ID NO: 38700 - DNA, 201 bp, Bos taurus
ggggaccgcagcctgagtgttttgggcaacagacccgggcagaatgcgagcagaggtgggggtagggagaggctgttcagtggccactgggtggagattgratttcagtctccatttgtttgaagatccctccctggtgagcaaggagaaggctggaagcagagtcaaggctacaaggggccctagaggcaatctggtcca

SEQ ID NO: 38701 - DNA, 201 bp, Bos taurus
tcgtgtttccatatatggcagggtcatccctctggggatgtccggttttctaatgtctggattttggtgtccaaggggagggtgccatgtgggtgtgtgtycattgagacctgggtttttcagggaagatcttctgagctctccactagaaaacctggcagacttgtcctgccaggggaaacagtacaataatggacaaaa

SEQ ID NO: 38702 - DNA, 201 bp, Bos taurus
cgctcaatcacgtgccagagtttcgtctctttccttgtggttgaggggcccgcccgttggtgtccccaccaatgctcacttctgggaacaggccctgcatytcagctaaatatggcagaattggtgggtcaccccacgcttgaggggaggggctgtagggacagagctgtaaacagggtggctatctgcctagtccccctg

SEQ ID NO: 38703 - DNA, 201 bp, Bos taurus
tgtcaactgtgtttccattttttcccttaaaagacattctgacggctaccttgtgggtcatcactcataacttaaggtttggtgcaagcccacattcgtarcagcactagtcacaacagccaagaagtggaagaaacccacgtgtccatcagctgagcaacagatgagcaaaatacaacatatacatacaatggaatgtca

SEQ ID NO: 38704 - DNA, 201 bp, Bos taurus
atccactttggttttggccttcctggaaatgttttgttgccctcttaattctctgtgtggaggcaggatgctgtagatctgcactgtctaatacagtagtygctggccatgtatggctgttttaaattgaaattaattaaaattaaattcagtttctcagttgcacttggcatgtttcaagtgcccactggtcaccagtgt

SEQ ID NO: 38705 - DNA, 201 bp, Bos taurus
agccattaaactgaaattaaacccttgttggaatcacttaattcagggcatgacaaattgctttcagtggaggcagcagtgaagtcccctcagggagagayggagattagcagcttccatggctggctgggtcccctcattgtcttggcccccttgctggctctgaattctgaaattggggtcggaaccatctaaagacca

SEQ ID NO: 38706 - DNA, 201 bp, Bos taurus
cagatgaagatactgagattcagagaggttaagaaatctgtgtcggccacacatccagaaaagtgatagagctgggttttaaacccaggcctggactttckacctttaactgtttatatcacatggagttcaaatgcagagaaacacctgaggtccagagagggactgtgagttgcccaaggctcctgctagacctgctgc

SEQ ID NO: 38707 - DNA, 201 bp, Bos taurus
gcattaaatgtgtaaaaacaggcatggatacatacagctgattcatgttgttggacagcagaaactaacatatattgcaagcaattatactccaactaaaraaataaaaatagtcatggaaaggtagatactaaattcaagatgggggtggaaaagggtgtcaatggagagggatttttaggagctgaatctgtgttggta

SEQ ID NO: 38708 - DNA, 201 bp, Bos taurus
atgataacaaaaggcagtatagataagtgtatatgtgccatgttcactttaatgactattcataagccagtaactaactatggagactatttctggatcartacaatccaagtgtggttgtaggtacactcaacacattaacacaactcttggtatctgacactgatgaaaaataaaaaagggtaggtgaacaaacacata

SEQ ID NO: 38709 - DNA, 201 bp, Bos taurus
gcccatgggcttagttgccctgtggcatgtggggtcttcctggaccagggattgaacccatatccctgcattggcaagaggattcttaaccactggcccaytatggaagcccagctgttgatttctggaagaccgtagtctgcaatactgtttgtggtatttgtgaacacttgaagatttccttttcttttttttggcctc

SEQ ID NO: 38710 - DNA, 201 bp, Bos taurus
aacattttattggagagcagcaagaaagctttacagactcctagaatatcacaaataagcaagcaggagaggaaatgacagaatagagatacttcgtgcaygcttagaggacaattttagaatacaaaagccttcttaacttgaatttcaagtttggatgtccctgattgaagcaccgtcttctttcaaggattctgctgg

SEQ ID NO: 38711 - DNA, 201 bp, Bos taurus
cctttgagctttcacatttgcctaaccatcacaaaggagacactccatgaatgtgtgctctttgatgaactgaaaacatggccaacatgggcatgcccagkgtcttgtagacccaccacacattttcccaggatcccttctctccctactcacttggagtcctcgctgtccagcagcccacggtacgtgttgatctcacac

SEQ ID NO: 38712 - DNA, 201 bp, Bos taurus
cttcccagttctttaaaaagagtccctgtggcccttggtgatcaaatgtgaaccaggttccgtaacaagaagtggtgaacacagagcatgaaagaggagaktatggccctccttctttcacctatgtgcacgaagttctctgcactgagtctaactttaggaatactgatatccacagccaggaagtctactgcagacaga

SEQ ID NO: 38713 - DNA, 201 bp, Bos taurus
cgaagacatttggccatgtcctcaaatgcccttttccctccttcctgctactgctgcccatccttcaaggttccttatcaattctgaatctcttctaaagmcttccctggactccccagctcttaatgacctctctgctcctaagaacctgaaaaccagcccctcagccacacctgccatctctgaagctgtgtggcagtg

SEQ ID NO: 38714 - DNA, 201 bp, Bos taurus
gcaggggaaggaaagcagactgaccctcacccccgtcgggtttccagaccccactccccaccattctcccacactttgagaggttccaggccacatttctycttgggctccacccctgctcctgaggaactggtggggtggggctggcatggtgccatggcccagcctcctcccacagggtggccttgtgcctggtactgc

SEQ ID NO: 38715 - DNA, 201 bp, Bos taurus
cactcgatgcatccaggccttctttgctaaccctgacctttctctcaacaggcctgcattcaactctggcccgtttctttaagagctcccaagggaaagayccttgatccaagatccttgatgacgtcactgctttctacttctcttggttcaggctggcctttccatccttggaagacttaggaacctgaatctctttcc

SEQ ID NO: 38716 - DNA, 201 bp, Bos taurus
gagttgaagtccactgttggcccttacctataggaagggcctgtgagcgagatctagggtgctcaggcctcctgctgaaccggaacgtagtggcctctgcygtgctgccagagtcctcaatgccatccactatcctgggatggaggcagtggtcatcagtcccatgggcagagagtaagggccagagcagggcagagcagg

SEQ ID NO: 38717 - DNA, 201 bp, Bos taurus
aagccaggaccgcctggcatcccgggactgcggccgccacaggagcatggccagtggcagcagcagcaacagggtcagcagcagcagcagcatctccaagyagctcctggaaggaggaaggcctccaagtactggtactgcatggaggaggggaaacccatttcctcccctcactctgccgagcacaggaaaatcaagttt

SEQ ID NO: 38718 - DNA, 201 bp, Bos taurus
tccccatccggattcacagtggaggactaaggagattcagagcaggatccgcaggtacaaaacacaccttccaaagattttgctctccttccttttctccytcctgccaactcccaaggcctgaagctacacacactcatgcaaacgccaaaatcccactcctttcccacacctcctgttttcttccacatcagagctcac

SEQ ID NO: 38719 - DNA, 201 bp, Bos taurus
cagcactcaagtggttagtctgatttcctcccccaacccagcacacaccttgggggatgtggtgagaatggaaagtaatttcctcctggcctgaagccagmtccatgtgcccgatcctgctgactgcagctcactggcagcaatggcagtgactgatgctggggaggcctgggctggattgagccagcctggcacctgtga

SEQ ID NO: 38720 - DNA, 201 bp, Bos taurus
aaatcctcaatgctggtgaagttgtagtaaagttggggcatgtatagactgccaggaaacattgtaaattggtatctatccctgggagagtgatatggaaytgtgtgccaaaagccatgaagatatccacacccattgactcaatagtttctgggaattatttgaataattaaagcagaagcagaattatgtatataaaca

SEQ ID NO: 38721 - DNA, 201 bp, Bos taurus
agtcacttttatactacatttggttcagtgtctttcatgggaagagggaggaagattccacatgcatgtgtgtttgggctatcaatttatcagtagctatrcacttaatgttctcctctggcttcaaaaagcatcccttggtattatagggtatatgtgtattgcacaaaaaactttgacttctgaaaatttgtacttaat

SEQ ID NO: 38722 - DNA, 201 bp, Bos taurus
tgcatctgggctgcagtgaggaaatgctgaccattgtgtccatgctgtctgtgcagaacgtcttctacaggcccaaagtaaggagtgcaggcctgtgttcrtgtaggggtcaggcgaagttgggtaaaatcagcctgttgccacccgagtgcttaatgtgcacacaatcaagtgtgggccatggagggtgtcccggcactg

SEQ ID NO: 38723 - DNA, 201 bp, Bos taurus
gggttttctggtaagattttgtttgaaaaaatggtgctgaggctgaaaatgtttgaaaacctctcaggactcttctgactgcaatagtgtgcaatctgcayggtaatgtccgactccagcaaccgtctgggagtgagttcctctgtcctgctctagtgtgtgaggatccctccccatggcctctctcatcgttttattttc

SEQ ID NO: 38724 - DNA, 201 bp, Bos taurus
cacatgggcttagttgccctgcagcgtgtggaatcttccctgaccagggatcaaacccatgccccctgcattagctggcagattcttaaccactggcctascagggaagtcctgggtggcttcaggattggatgcagctcgagacatgagcagttcaggctggaaagttgtgaccacaaccacagcagctgcagtcacacc

SEQ ID NO: 38725 - DNA, 201 bp, Bos taurus
tgccaaatgtcaccccatttcatcctttcaatagcactaggtaactactcttacatagaatttgcaaaagagaaaaggggtgggacttccctggaggtctygtggttaagagtcagtactttcagatgtggatgaacctagagtctgtcacacagagtgaagtaagtcagaaagagaaaaacaaatatcgcatattaatgc

SEQ ID NO: 38726 - DNA, 201 bp, Bos taurus
ggtcctcatgtgagcacctgtccatctccaagggtctcatagggacagtttcagtgtgacacaaagggatgaaaaatagtcctatgaccaaaaccagagargagacagagaaggccagccccccacgcccctaccttggagaacaagcgcggcagcggggggtgtgggggttgccttcctcccctggctggccttttggtt

SEQ ID NO: 38727 - DNA, 201 bp, Bos taurus
ctcattccattcatctgttttcccctctagccagaaaatccatagttctatgtctttatctggataacacctatacattatttatacaagagagtggtccrttctccaggaagtttccatgaacttttaaggttatatcaggtattctttcaaatgatttggagattttcctattgtctttctgggactgaatttgagtcc

SEQ ID NO: 38728 - DNA, 201 bp, Bos taurus
ccttttagtaggtgccattactctcatgagcagctccttctagttaacagacctaaagataaatctcattgcaaaggttctacaatcagttttttattcarcttagtatcttttggacagtttcaaaacatctctatcatctaacatctctctacaactattcaagttgagctacttagttagtaagcaagaaaaggttgc

SEQ ID NO: 38729 - DNA, 201 bp, Bos taurus
ataccatttctaaaaaaaatttttttgatgaaaagtattactcatagtaaaagtcggcagatccaaagtttccaatttgaatcaaatccattattaacagraggatcatacagactgaaaatttaaatcctgtctggctttcctatctagactaggtatgagccaagtttaaagttttctttgtcagctttattgtaccac

SEQ ID NO: 38730 - DNA, 201 bp, Bos taurus
tgtagggatcctgggccctggttttgattatctagcactgctataggatacagtaccccaaagacctggcacagtgttccatctccactgcttagctgtgmggccttggatgcatttcttacctctctcagccttcctttctttacgctcaagttgggatagggtctgtcctaaaaaccttgttattattgttgcttagtc

SEQ ID NO: 38731 - DNA, 201 bp, Bos taurus
gacaagattcagggaggggcctcagggcagggagtgggatatggtcaagggaaggtcaagatgtccagctaggcttgttcagagctgggaacccagggagrtaaggggctattggaggccaacagtccatacacttgagcaccagtggagctggtccagaaagctaccagagacgtgtcactcagggtcagcaagttctcc

SEQ ID NO: 38732 - DNA, 201 bp, Bos taurus
aacaaacttcctcacatctgtacagcttggtggtgggcccctcatctggggatctggattttacccttcttgaatggacgggcatgagaagaaggctccarccttgcttaggcccttctcctgcttccagatctcttgtaagacctaaggcttgcggtggacatgggagctgagaaggccgactcccactcagcccagact

SEQ ID NO: 38733 - DNA, 201 bp, Bos taurus
tgacacaaaagccaccaattgtatgattccacttatatgaactgtccagaataagcaaatcaacagagacaggttagttagtggttgttagggcctatgcrcttcccttctggctcagctggtaaagaatccacctgcaacgtggcagacctgggtttgatccatgggttgggaagatcccctggagaagggaaaggctac

SEQ ID NO: 38734 - DNA, 201 bp, Bos taurus
cttctttaaattgtccttgatagactggtatctttttcagagttcattccaatgtgtgaaattgctgccagcattgagtccctactcagaaaattactgaraatggtctctgaactgcatcttatttgaccttggagttgccaggttccagtctagctcaccaaaccaacccagagtatatagaatttacatttccatctc

SEQ ID NO: 38735 - DNA, 201 bp, Bos taurus
aggtggccctctgtgagcagggctggtcagccctcaggcaaagctggcatcacaattgttggagtcattatgaggattagttgctgcctctagaagtgcgkctggggccactctaggagccaataagtccccgggtgggagagggccccgaagacccctattaggaagcagcgatcccctctaaggctaagctgctgagcc

SEQ ID NO: 38736 - DNA, 201 bp, Bos taurus
cttgtgcatctcgttctgttgatgacatcaccatccctctcaggagtgtcctctcctccctcgcctgctcactcgagtcacgtggatcctgcctccataaygccctgcctgtggcctcccttcggcccccttttccgccagcacccccgtgatgtcccaccatttcctctcgcttcctgtcatttctattatgatccttcc

SEQ ID NO: 38737 - DNA, 201 bp, Bos taurus
gatctgctctcattgcccctgccaaggcccagctccctggaccctcacattccatggtctcagacctagccttcggcaaacttgattaagcaaagcccctygggagtcagagcagatggggtggcccctgccctggaggtccgggccttaccaagccactggcagctgagtttttcgaatctttgaagaaagtcaggattc

SEQ ID NO: 38738 - DNA, 201 bp, Bos taurus
ctgaaaggcccaggctgaaggaaatgggtgtctgcactgaggagaagacctagaaatgggatgtgagcaagggagtatcatgcagccttgaaagcacgggrgtggagaggccctgtgggtgcctggctaacagcacaggttctggggccactaagtcctcttccggctccaccattgctcgctgtgtgaacctgggacagg

SEQ ID NO: 38739 - DNA, 201 bp, Bos taurus
tgtccgtggtgaagagcagagcctgtggtcgggagagaactactttctccatggcgtgggtgtgctggtgataggagacacccgtgggaggtgatgggccragagcccagctcccatccactactcaaccccacagaacattagctccatcaccacgatgttgtgttaataccgaaccatgcaaggcgaggggggctcgga

SEQ ID NO: 38740 - DNA, 201 bp, Bos taurus
aggtggaaaatgggatggcaaaggagagagccatccaacccaaacgagggctcaggaaatactctggcttaatcccttctcaccataattcagtgtaacaraactgctatccataggggctggtagacaagtccaaatgcagcagagccttcttggctctagagatagagccaatttgtctcttttctttgttcccaaaag

SEQ ID NO: 38741 - DNA, 201 bp, Bos taurus
taaggactggtatcatttaggggctgtgagtctttaaacgttttctgacgaccttagctcagtgatggatccttctaagttgcttaaggagatcctgttgrtaatgctcatttaccttccatctcatggtgccccatgttagaccttttttcgaacaccctggctctccaactaaacagtaatacgcctatgtgcaggggt

SEQ ID NO: 38742 - DNA, 201 bp, Bos taurus
ctccgtggtagacccagaaagaccaagatattaaggcaggactttgagaatacacagcagaacaatcactcgtgagtcagcaatgcttccaaacagccagygagatcctggaattgcttggtatcactgccctccagacctcgccgggttccctgtgtgagctgggaaatgtttgcaggcaggacacctgtgatcgctttt

SEQ ID NO: 38743 - DNA, 201 bp, Bos taurus
cttcccactgtgaggagggcctgcataacgacaggagcaagtcaggggaaaaaagccaacctaagcaaaggagaaccaaacaagtttaaacttttatccayaaagtactgaggcctcaaccagctgctcattaacatttcccgacacaatttcacggcagacatgttttctcttattagcaactaaacagactgattagca

SEQ ID NO: 38744 - DNA, 201 bp, Bos taurus
gcaatgatgggatgttggaacatcccagatacagaaaaaaagatgggaggaaaattggatgttgagagcatctgtattcacctcccagaaaaatacccccygctccctcactgccccacttacttcctctcctctgtaatttagaccatgaaggggctctgatttctaccatgttccctgagcctagtgcagtgcctggca

SEQ ID NO: 38745 - DNA, 201 bp, Bos taurus
cccgaaaatcgttggccttacatgcaacattcttcttttaaaaaaaattttatttggctgtaccgagtcttagttgcggcctgagggttcttttttgttgkctgcaccccatggcacgcagcactttcctgaccagggatcaaacctgtagcccctgcagtggaagcacagagtcttaatcactggaccaccttttagttg

SEQ ID NO: 38746 - DNA, 201 bp, Bos taurus
tccgattcctggaacccagatcccatgatctggcagccatcttgagggcgagtcctataagatcacaggaggtcagagcacctcagggcccacacatgctrcagcccctctttgccttaaccaccccctcagggactccctgctggtccagcagctaagtctctgtgctcccaattcagggggcccgggtttgatccttgg

SEQ ID NO: 38747 - DNA, 201 bp, Bos taurus
ctggtggccgaggtcagtccacggtcctgctgggactctgcccagcgacaaggttacttcctagcgggtaaacagctccctgcggggagcacctgagtgtrtcacagcatccagatggcccacccacatcttggaggattgtaactggataaccccccaggaactcagtgatgtactctagcatccaattttaggacgatc

SEQ ID NO: 38748 - DNA, 201 bp, Bos taurus
ttccattaaaggggttggggtgagggtgctaagaaaagctgatggatcaaaagccaatagtcacagcagatatcatagcactgacttcccccaattatcayagaaaaccattgccctacaataaatttaggaataagcctggcttgcttcgattcatggggtcgcaaagagtcggacacgatcgagcgactgaactgaact

SEQ ID NO: 38749 - DNA, 201 bp, Bos taurus
accactggactgccagggaagtccctatttctcctttttaagagtcactctccccaacttgaaatgccagcattcctcctcagtagggttggggccttgtygggttttcctcactcccttttcctttcttcccccccaccttccctccctccctttttttctccatgaagtatttattgtccgctgtaaacatttaggagg

SEQ ID NO: 38750 - DNA, 201 bp, Bos taurus
tgtggcttaatccccattgtgagagatagactgaagatatctgcagtttggttgggaccagtttgcagttgtattgtgtggccaatcgaacagagattatmattggcttctggggtgatcaaacctatgacccaaattggcttcacttgccctggggttctaaccagcagagctaatctacccaggtgttcactttaacat

SEQ ID NO: 38751 - DNA, 201 bp, Bos taurus
acctactcttcctgaacctattaagaagaggtgggaagaatacacagaagaactctgcgaaaaagatcttcataacccagataaccacgaatgggcaattrttcatctagatccagacagcctggagtgcaaagtcaagtgggccttaggaagcatcactatgaacaaagctagtggaggtgatggcattccagttgagct

SEQ ID NO: 38752 - DNA, 201 bp, Bos taurus
aaatttgttaccagtttcctggcccaacagctagctgtgctttgtttttgtattttcacatttcataatcacttactcttgagccagccttttgggactcktgggaggcctaagagagtaaagcttttctatacataaaaggcaggtggaagatatgtaggtggtggtctgtcctgggaaggcagaaggcctgatagggtc

SEQ ID NO: 38753 - DNA, 201 bp, Bos taurus
atccttggaacattgttaatagtgtctctgatgggaaagttgcagttaaagactttttacctaccttggagaaacctttgagtaaagaacaacttagaaamtctgcaacagatggtgagtacctcagttacctctcaggtttcctctttagagtatacctgttcacactgactaaattttttaaaaaggagtgagaagact

SEQ ID NO: 38754 - DNA, 201 bp, Bos taurus
gaaatctcatgccctttagctgtcaccctacaagccctatgtaattactaatctatattctgtctctgtagatttgccttaccatttcaaataaatggtawaatctgtgggttttgtgactagcttatttcacttagtatgtacaggtttatctgtattgtagtatgtatcagttaattcattcttactttttgccttttt

SEQ ID NO: 38755 - DNA, 201 bp, Bos taurus
ggccctctacgtgacctttcagtatgcaatggctgctgcttcacttttgcttccgaaatatcatgcaagtttctccatggccacctctacctcaaaaccayacaggactggcaaaaccaaatactggcaaggatgtggagaagcaggaattctcaaacactgctggtagaaatgcaaaatggtacggccactttggaagac

SEQ ID NO: 38756 - DNA, 201 bp, Bos taurus
gcagagtgcctcataacatgtaaaggagatgttttgtcttcacagtccccaccctaccctctgctaccttggttttctattttccttgaacatctgcattrcaactttgcttttctccctcccattagggtttggtgcataacacttaactaaatcatttttattttaggcatgattttaatcatttctcatttcatctct

SEQ ID NO: 38757 - DNA, 201 bp, Bos taurus
tcaggtttgacagaaaacaacaattctgtaaagcaattgtccttcaattaaaaaataaacaaattttgtaaaaagaaagaaggccctggagaaaagcctgktatagttccatgacacatgatcaaaaaaactacaaaaccgggattttaatgcatgcctaaaattttattttcatagcagttatttccttattgatatatt

SEQ ID NO: 38758 - DNA, 201 bp, Bos taurus
tttgtaattccaggactgacccaaaaacatatttgctaaaaaacaaaacaaaacccacaagtactcaaaatccatgcctgtttgcttgtcaggctctgtargtagaaataataaacaataggctggccccaaacataagtcctaaccccaaagcaccttccatctatacagtgcctcaagctgtggaacccagcttatgtc

SEQ ID NO: 38759 - DNA, 201 bp, Bos taurus
agctcatcaaaggtggcaagttcagcgcctgcctggaagtccacattcagaacgacgggcctgtgaccatggaactggaatctccggcccctggtgctgtygcctctgatccagaacacctgtcgaagcttgaaaagcaacaacagaggacagaaaaagccagagccaaagggccttccggatcaagcaagaagagaagtg

SEQ ID NO: 38760 - DNA, 201 bp, Bos taurus
ccgctacagccgcagctcctccggccccagcgaggccaccgagaagaacatcctggtgtccgacatggaaatgaacgagcagcaggagtagagccgagggygtgggcggggccgagggcgtgggcggggccgggggagctgggcgccccaccagctgcggtccagtcggcctatggggggaggtggcgccctggggagcgc

SEQ ID NO: 38761 - DNA, 201 bp, Bos taurus
tttcaagctttttatgttgcacattataacaacacataatttcaggtgtcgaaatgaaccttgatacagatggcaggccaagttgacagtttcataggacktttgatacatgtgcaaggttaagagccaaagtccagaccagagttctgaaaatagacaggcttttatccatagcagatactttcagaggaatttgagatt

SEQ ID NO: 38762 - DNA, 201 bp, Bos taurus
atcctcccccacgtcccccaggcagctccactctgcacaacccaaactctctgggcaaagaatgttccggaagggccaggcaggcctctttctggaagacraagctgagaaagacagccttagagaagccagtgctgagcgcctgcttcgtgccggccatactcagggctctatggggattctgtgcagcagcctgtgggc

SEQ ID NO: 38763 - DNA, 201 bp, Bos taurus
ttcttttcacagagcattttactgtgcagcctgccctgctgatctgaatcagggatgcttcctgggtaatcagtactgtgcagtcccgaggctggtggccracagcactgagcagaggtggggattcatggtctgtctgcaggggatgaaaccaggaaacattccctgaaatcctctgtggccaggaaatgcttccatgga

SEQ ID NO: 38764 - DNA, 201 bp, Bos taurus
tgaggagggtgagagcagcgcgggaggcaggacacccgcctgctcctttaaactgacggcaggctggcaggacaggcctgattagaaagaagggacgaagscatgaagacgagcatgggcatggtgtgtcctgccacatgggtctattctccatgtccaggacggagggtgggtgttgggggcgagggccggcatgagtga

SEQ ID NO: 38765 - DNA, 201 bp, Bos taurus
ggccctggggtgtttccgtatgctgccttcaccaggcggtgtgctgcgtgttctggaagtaagctcaggacttgaatttcaggttttagtctttctcactrgattcccaaaccagcctagtttggtataagagctcacagaatattccttaaaactctccccagctagaacagggaatgaatgaacctggtatactgaaat

SEQ ID NO: 38766 - DNA, 201 bp, Bos taurus
tccacctgcaagcgggggaagcacaccccgagggtagaaatgcacttatgtatctcctcccaacgtacccaagcagaatggagtagagacgagagatttgytgttgaatgtgcaggaggagaatcagttgtagtttaagagtgaaggattattacaggattgaagggactggaacatcttgatgggtgaggactggtggtc

SEQ ID NO: 38767 - DNA, 201 bp, Bos taurus
ttatgtacaagtgggaataggatgcacaaatcaaattttgaaaatatgtttcataatacatggtaatactgcttgaaagttagtcagtaccacacacaacytcctgtctatttagggggcaaaggagttaaagttgtgctctattattttaggagagaggtgtctttgatgataaaacttgaaaataatttacaagaagtc

SEQ ID NO: 38768 - DNA, 201 bp, Bos taurus
ggagatctgagagacacccaaggtggacactgaacccagtgatcaaaacactggcctggcttccatcctggaaccacaatccattagccctggccaccackcctaactcttttttttcctttgctcttaagcattctcaaagaaagatgcctgcaaggtgcatgggccgtgccttctccagatccacagaaaagactgtcc

SEQ ID NO: 38769 - DNA, 201 bp, Bos taurus
gatccactgatcccccctgccgcccccaggctggaggaagcgcaggcctgaccacatccagctttgtgtcgcctgggcctccgctcaccctgaacctcagmgggcagaagaccccacagccacgaaccctgtccaggctggatgcctccagggaaggaggcaggacaagcggggcagtcattggtgctccaaggagggccc

SEQ ID NO: 38770 - DNA, 201 bp, Bos taurus
gggagccacagagcccaagcagggccaaaccttccagggaaggcaacaaaggctaattgctgagcacccttcaagtaaacccaaaggcgctgtacagaggrattctcttaactcactctccaggccccctcccaccaggtcagagaagaaacctcaccaccacccctcttccaccaccctccactcatccaccctcacaca

SEQ ID NO: 38771 - DNA, 201 bp, Bos taurus
tgtctgtttgtggccgtgcagaacctggaggactgggaggtgaggctgatgcaggaagggtgcccaggctttggggctcctgggtttccctgcagggctcrtcaaaggaagaaagattccaggggcctaattccctcaaccccatcctgaaatgtgagcccagtggtctctggccagcttgacttggcccctggacattgc

SEQ ID NO: 38772 - DNA, 201 bp, Bos taurus
ctcccccctcctccacccaacccatgcctgggctcctcctctgggcaggagtgccacgctgcagtcacctgggagatgccccagtatggggtcctcggccratcatgtctttggaccatgaataagaccctcttggaccctcttttctttggaccatgaataagaaccagtttgagggaccttccaggaagcacctgtgga

SEQ ID NO: 38773 - DNA, 201 bp, Bos taurus
acgactgaagtggctgagcgtgcacgcatgccacacgtggaccagtctcatcagttccttctgtgttccctcccctaaaacttcctccccaaagggccagyccctgaacccccatcccatatctaaagatggcacttcaaaagaggcagaggctcccctctgggctctcattttcctaggcctccttgcacctgggcatgc

SEQ ID NO: 38774 - DNA, 201 bp, Bos taurus
cagtgggggacactgcaaccctagaggcagcctgccaggcccagggataaatatttgttgaatgaatgaggactgacacctggatgcagaggtgcccctcygtgcctcccattggctgaggcctcaggcagggctgctgtcttccaccttattactctcctggcacggcccgggagccagtggggggtgggggactaacgg

SEQ ID NO: 38775 - DNA, 201 bp, Bos taurus
gtgccctggtactcatggccaggccttcctcactggtcttgatagaaccagctgtccttgcctcccaactagtctcagcccttaaactctagcaggcggcrggcagtggccacagacagaagtcaggcattgcagcccacaaatgggggacaagaaaaggggccacaagaggtggtgcctggggtatccagtgccagggta

SEQ ID NO: 38776 - DNA, 201 bp, Bos taurus
ttcatttgctaaaggtgccgctcccttaggaatgttcacttttcaccgaggagtgtgtaaaatgcttatgcttgtgtacaattgtttatttcagatatttrgctgtcctttttaaggagactagttagaaacatctgagttcacactctgatgtaaaactgagtgaaagttgtctctgcagtggagtgtgtaactgcatca

SEQ ID NO: 38777 - DNA, 201 bp, Bos taurus
agaagttaacctatatttcacgggtttcacgtggcctcccaaagtttccccgagaaggctacaggaggctgtgctgcagaccagccctgtgctcgtccgcwcacccacctgggccctgccctcaacaccccatgctctgacctcgggaccccgtgctctgcactcagtctgtcccaagtctcttgtgtgcattgctgtttt

SEQ ID NO: 38778 - DNA, 201 bp, Bos taurus
atgagggcagagtgggcatggtcacgctgctccaccttggccgggacattcccgtcccctggggacggggtctcccctgagcccagccacacctcctgtgyctaggggtcatcacgttaaggccacagaggagtgtgtttcctgggccacctgccacagcctgggtgggatctgagtggtgggtgtccccacgcctcggag

SEQ ID NO: 38779 - DNA, 201 bp, Bos taurus
caactgcccacagttcttacccaaggttcaactgccccatcaccactgtacacaactttttccagggcctaaagtgaattatcaggccttggtgtctataytgacagtggttttaaatctcatttgacactaagagtaaaacagccctccttacatcacagtctggtccctacacctgccccataaatacacattaactga

SEQ ID NO: 38780 - DNA, 201 bp, Bos taurus
aatggtcacgaagagcgaaaaagcaacttagcattggtcacaggagaaatgtaaagcatttaattcacctgctttaaaaattaagaacaaataaccccctytatgaaaagagaagcaggcacagagcaaatacacccaaaaaacacatttccgtatcactagatagatgtgaaacgcagaggaaggtcggagaaagccagt

SEQ ID NO: 38781 - DNA, 201 bp, Bos taurus
ggcaggcatgactccaggtttccaggcctgggcagctgggaggacagtaacagtgcagagaggaaacacaagaggaggggcagatacggaagattaaacayggtacatttattctggacgtttactgacttcccacatgagccctaatccagaaacacatggtaaagtcacatccctctaggtcactgctccacgtctgtg

SEQ ID NO: 38782 - DNA, 201 bp, Bos taurus
gagtgcaggaaacaagcggacaggggaggccttccacatccggtgacaagagcaaggtcttccagaccgcagggtgggaggcaggggcagtgcagacaagracggggccaaacctttttgctttcttttgatttacaacctccttaaaagcactgaggagctgtcaggctagcaagaaactacaaggtcaaaatctgaggg

SEQ ID NO: 38783 - DNA, 201 bp, Bos taurus
ccgctgagtcactggcctggcgctggaatcctggcttcagggctccagtgcatccctgctgccccaaccctggagtgcacatactctatgggaaggagctycccttgataagggcccagccagatggttctaaacactctagtaatatgtctgctgtacaaaaaacaaagcctcaccattaataaagcttctagtccagtt

SEQ ID NO: 38784 - DNA, 201 bp, Bos taurus
agccaaagtcttctgagcaagggaaagacttgcctggagatgccagctggcctccttcccccaagcctgcaaccctcctgccaccacttttcactgggccrgcagagagccagcacttgggggtaagccgccaaatccagggcagtagccacccaccttgagcttggagtgtcggctgcaggaggacatcacggtgtgctt

SEQ ID NO: 38785 - DNA, 201 bp, Bos taurus
cttccccttcatactggtcaaggtaggggctcaggccgcagcctagggcacacagcctcccgcaaagccaagcacgcagacgcacgtggggccagggcatyggattccatccgaattctgacgttcactctttttttaaaacgtccgtggagtcaagtcttagttcttagaggggaggcctgcagacagccaacaggcatt

SEQ ID NO: 38786 - DNA, 201 bp, Bos taurus
caaagtgctgcgctgggtgtggcctgaggagcccatgggctggctactctcagagcctttggtgtctcattcaatggaaagaagccagtggccagcagccygagagtcaggggaaatgtggcttgtccacctgtccgtcggcatgatggagcacctttgacagaactgatgtggccacaaggacgtgtttactgagctaca

SEQ ID NO: 38787 - DNA, 201 bp, Bos taurus
cagcttgcctggcccaatgactgagacgctcagcgagctgtcacctccaggacagggtttctaaaccacagtaccaccaacacctggaactggagaatctycccttgggggcctgtcctgtgtgctataggatgttcagcaacatccttggcctccaccccctggatgtcagtagtgtcccccagttgtgaccactagcag

SEQ ID NO: 38788 - DNA, 201 bp, Bos taurus
taggagggtctggtggtctgggttggttttggttttggtctctttttgtattccatctgcaggtgacatttccaggcagctctgcctcccctgtttgtttktttttttaattggcagagccttttgaggaaatgcccaaatttcccttttcttggagtggaagaaagattgggcggaggtggcttgattatctggcttcag

SEQ ID NO: 38789 - DNA, 201 bp, Bos taurus
ggaaagatatttactgctaacagttctgggagccggagtccaagatcagggtgccagcaaggtcgggtcctggtcagggccctcttttggggtgcagatcrctgttttctattttctcattgtgtcctcacatggaaagcagaagcaggaagtaatcaggatactaatcccaccacaggggccccaccatcatgacctcat

SEQ ID NO: 38790 - DNA, 201 bp, Bos taurus
cgtggttggaatacagcaccccagggtgctgccctgactcaggcagggtgcgagcagatggcgccatcagcatcgatgcaccatggggggccaagcagagrgttcccggagcatggcgtcattcacagcgtccaaagaggacacagctccacctgaggttctgaagaaggcttcatgagtggatggctcgaggcctcatgg

SEQ ID NO: 38791 - DNA, 201 bp, Bos taurus
aaaaaaaaagctaacaaatcagaagtcaaagccagcagtcatgcttggggagagttcatcagccctgtgatgggtcagaggccaaggccaaccagaatgaygaccctccaccccactggatcaaggtctcttaggttcccagaggagtcatagaccacgcccatcttggaattccctaggagcccgcacctcctacacaag

SEQ ID NO: 38792 - DNA, 201 bp, Bos taurus
aggccctggtccccagtgccctggctaccaacagctccaggagcacttccctcttcccctgcccgtcaggggtcttcagcaggttccaagtcgtcatccgycccttctacctgaccaactccacggacatggactagactcgaggctggagttcaggatgggcaggagttcatagaggctgggcacctcccctccttcacc

SEQ ID NO: 38793 - DNA, 201 bp, Bos taurus
cagcctgaaaaagcctgactgaccataggctatgggaggaggcgggcagggtaggactttcaccatcctcaactgcgtgagcaggatggcaggccagtcartgtgctcatctgctttcccagccaccggtacgtacacattggagagaaagggaaaaaagccccagagtcccatcgtgtgagatccacagtgatccgtgtt

SEQ ID NO: 38794 - DNA, 201 bp, Bos taurus
aaccctgagttcgggcggtttcccaggtgattccattgcgcagccaccgggagaagcagtgttttcaagacacccgctccccacgtaaccggtgggcttgytgaagaggactcaggccctgggggtgggttctccccaaataagtaggaccaaaatgaaaggaaacacaggagggctccatagctaaggagaattggctgc

SEQ ID NO: 38795 - DNA, 201 bp, Bos taurus
tgccctcccgcatcggggctcgtcagcttcccggtatggtcaggtcagcctgagtgggggtatggcacagaggtgagcgggaccccagccctgtccttcgrgggcccgcagtctggtggggcacacagaagggtcagacacagcaaacttgtcactgaatgcagattgggggatagtcagttttgcctagggtccagaaca

SEQ ID NO: 38796 - DNA, 201 bp, Bos taurus
agctgtatgaccacagccctgttagggtggccggaaatgtgcctgacatctcaaaattagcaagtgatacagccaggatccgagccagggcccacacctgygccttgaaccctgggacctgccttttgatactcacatgcagcttaatgtctgggcgcccacccctctccaaccccggatcccaaaagggcccacccagac

SEQ ID NO: 38797 - DNA, 201 bp, Bos taurus
ctggcctttttacaacacttcaaactccccagcacatgttgctgccttaggatctgtcctccacctcccaccccggagcttgtccaaaggtcacttccctkagaagtaagtgcccggccccccccaccctataacaggacttttttttttctttctattaagaactgtgatctaatcctatttattggtggattgctgtgt

SEQ ID NO: 38798 - DNA, 201 bp, Bos taurus
aggggggggtcggggaacttccgatgaactctggccgaggtgatggtaatccctgaagccaggatgttctgtgggaaagagctagaagggcaagctgagcrgcagtggtcctggggtcagggcctgcaagtccagaggaggggcccgtaccttcctgcctccaacctcacaaacctcccgagactcccatgatgggaaggg

SEQ ID NO: 38799 - DNA, 201 bp, Bos taurus
cagctatatggggtaaatattctcattcacttccaaggcctcttttttttgggggggggggctacaccatgcaaccagggatcttggttccccaacagggmtcaaatcctggctcccaggcctaaccatcagactgccagggaattcccctcaaatgcctcttcccatctgagctgcctcacaataattttaacagaagat

SEQ ID NO: 38800 - DNA, 201 bp, Bos taurus
agaccctggaagggaggatcaaggtgccggcaggggaggtgtctggcgagggtcctccccgggatggcagagggctttctggctgggggctcccgtggccyctttgggtttgggagcagctctccctctctctagggagacgaaccctctgtgtctcttcaaacaatcctactggatcaggactccatccttctgacctca

SEQ ID NO: 38801 - DNA, 201 bp, Bos taurus
gagggctcagtgtggcccctcagtgtgtgccgagacccctgggacctcctggctcagagcaaagctgtgtatgctaacacccagggctgacgctgaaacaygggcagcagagcctgggcctggacaatccccgagagtctaggtaccccagcccccctcagccatctgggagtccttctgaagaagctgcaggacaatatg

SEQ ID NO: 38802 - DNA, 201 bp, Bos taurus
accgatccatcacccagagccctgaatgagctccgcacaggcaatgcgagggcagggcagggctgggcaggaaggccccttggccggcagggccagctgcytcctccagctccatggctggaaaaataccagccaggctaactgcctccagtctgctaggagatgacaggagccctcgaaggccggtgggcccacctccct

SEQ ID NO: 38803 - DNA, 201 bp, Bos taurus
agcgcccatccgtcatccctgggaggcccggaagctggtcagcaggacgaccttcctggagcagctacacgtggcgggtcatgaggactcacatagggcaygcctggcccaaccagccatccagcagcttagcaggcacctgttagtggcagcaaactgtttggggtctttacaggtaaagctaaaccttagcaggcccca

SEQ ID NO: 38804 - DNA, 201 bp, Bos taurus
gtttccccgtctatttgccgtgaagtgatgggaccggatggaaggacacacacaaaagatggcaccttcgggcagtggctgtggctggcctgaatgccttraaagtgcaagtcgctcagtcgtgtccgactctttgtgaccccacagactgtccatggaattctccaggccagaatactggagtgggtagccattcccttc

SEQ ID NO: 38805 - DNA, 201 bp, Bos taurus
gaaccctcccctaggtggtatttaggttggccctgtgatttgctttcaccaacatgggaaggggtcacgcaaatgctgagacatggagagaggtgagatcyagcttgcattagacccctttagacgtgcaaatgaaactaccttggaagttttagccctataacttaaagaaccttagcactataacttaaagaaccacaa

SEQ ID NO: 38806 - DNA, 201 bp, Bos taurus
cccctcaccgaggtccctgacgcttagccgtgcgacatggcgacatgtcccgcctgcggccgccttcgttccctcctgaggccaggctcccgcaagtgagsaagccgaccaccgtgttagacccatgatacgaagatgaattcgagccggtccctgcacccgagtgactctccaagcccgccctggactcccaggccacgg

SEQ ID NO: 38807 - DNA, 201 bp, Bos taurus
aggatgatggctggggggcggggggggttggaggggtggacacatgcctgtatgcaagcatgcttccaggggtcctgcacccagacccccagggatagaamcaggacacagggcccctgcccccaacacacacagagaagaagcccaagagacacactcgcaggccttatttctcctctgcctgcctgtaggtgagtgcct

SEQ ID NO: 38808 - DNA, 201 bp, Bos taurus
acggggagtgggaaggccgtggtccttcgcccgattccaggtgtgacctttgaaaggaggcggtgagcaggcaccacttgactgcagaatcacaccacccrgctcccaagcacctgccctgggactggggttggaggaaggggtgctggcccactgggtggcttctctggcctttccccactgacccaacaccccgtcggc

SEQ ID NO: 38809 - DNA, 201 bp, Bos taurus
ggggaatccaccacggtgaaaagccccctggctgcaacgagcaagcagctcctgctcaccaccactagaggaagcccgccccgtgccacaactaaggcccrgagcagtcaaataaagaagtaaatgctgaaaagaaagacgtagtgttgaagtcttctgagcgttcatgaggtgaatgaagagtgagaaaagacagttggc

SEQ ID NO: 38810 - DNA, 201 bp, Bos taurus
tttattaaaaatgtaaatgcttttaataccaaaggtgcatgtcctctgctaacccagactgttaaatggtttcttaaagaacgagagggagatgacttccmtgtcagtccagtggttaagactctgagcttctacctcagggagcagggggttcctcccctggtgaggaactgagatcccacagcctcgaggtacagccaa

SEQ ID NO: 38811 - DNA, 201 bp, Bos taurus
gccgtgaggctctgatgccttctcaggcgggtcctgcttggtcagccatgggatgtggtgcgcccgagtgcccgggagctgtgggtgtaactcgtggcagygttccaggcccaaagacgactcaggtactaagagagacggccttcacctggtgcaccaccccagagcactgttcaggctcggctccgtgttagaactgct

SEQ ID NO: 38812 - DNA, 201 bp, Bos taurus
cttcccaaccccccggcgaagctgtgtgggcgcgcgggcggcctttttccgccccgtgggaccgcctgacgagggagggccgggttgctgagagcgtctcsgttccccccgcaccaccaccaccacctgggcaattccttgaccttcttccggggtccgcttgtcaaggggctgctctgaggcgccactggccgagaacag

SEQ ID NO: 38813 - DNA, 201 bp, Bos taurus
agccaattgccctgagaccccaagccgtgggctcagcagcctctgtaccaaggcttgaccgcttgcttccagatgaggactaagaactgaggcccacctcmctgacccatctcacgtaccctcccacccctggtggggatcccccgactccttcagaatagcgagggcatcccggcagggcccaaggtcactggctattca

SEQ ID NO: 38814 - DNA, 201 bp, Bos taurus
tcagggagcatagaaggtggtactcctcggaaggagtttctgaggccctgcacttttccatgtagggcctcagaaactctggccctgtgaggattcattgyggattttgggtggtcacccacccatcccactctacccacttctggagtggctggccccgtgaatgactcagttccaagagatgtgaccagttctgcacca

SEQ ID NO: 38815 - DNA, 201 bp, Bos taurus
tgttgggggtcttcccagggcggtagctggccaggacctcaggtgcgtagagaggcagggcccggcgggggttcagagcgagcaggaggggccccccgaasgtctaggaagacagtgaaagctctcatcagaatgtgaagggagcagggttcagcacccagcctagggaggatggagggggacactctggggggtgtgtgc

SEQ ID NO: 38816 - DNA, 201 bp, Bos taurus
ccccttggaatgtgtgagggactggcccagagtaagtcagcgggccagggctagaaccataaccaagggctggagccccaggcagaccccacacagagtamtgggggaagacacaggggcctccctgcgcatctttgtccaggcctctgggtctcatcagtggtacctttgaacagaggttccctgacaccagggctcctg

SEQ ID NO: 38817 - DNA, 201 bp, Bos taurus
gagtaccaggtaaggccagcacctctgcctagactcctggctggagggaagaaagcctccaggggcaaaaaggaggaagagaaaagcaaagggtgaccagrggtctgtccagggccaaggggctggccccggagggggatgcctgcccctctcgtcccggaaaaccccggaagaagagagtctgggaggcccgcctgtcct

SEQ ID NO: 38818 - DNA, 201 bp, Bos taurus
tgtgggttctgagaaagctggagccggcccacaggtttaagacgacgctccccagtattctggacagtccaggggacccccggaaggtctggcccagtaaygtttggggtgagggagagcgtctgatgtccacgcaggcgcaccctcagaccagaggcgtggctcgggcaccgccacgcccggtcgggagcgctggggaag

SEQ ID NO: 38819 - DNA, 201 bp, Bos taurus
atgtggagtaccttctcccctcccccattccctccagccaccaccaaagtcttgcatcactagatatttggcttctggaggagaggggcctgtcctccccmacctctaccctgagctgctttctcatcagtgcagacccagagtagaagtgagccagtcctggcaggctgctccttgacacctcagagggccccattcgcc

SEQ ID NO: 38820 - DNA, 201 bp, Bos taurus
ggaggccacggggctgtccccagtcccagggggatcgccagcctggttctgagccccttctcccttgacaatggggacgggaggatcggcctgttttccgrgatccccaggacctcccgggacccctgggtggtcgtcgctggtgaagtccaggcagcgagtcaggaggcggattcgccgcccgcccctccaccccgggcc

SEQ ID NO: 38821 - DNA, 201 bp, Bos taurus
cgatctgcatccctcttttctgctctgggtccattcttcctctgtcaggactctctgcccactccactccgaccctgccttctgtccaaattctgctcatktcttaaggcccaggccaaactttcatgaagccttccttggccacttgggtccacatttccttctttgagctcctacctccctttagggccaatgtattac

SEQ ID NO: 38822 - DNA, 201 bp, Bos taurus
ggcggggggttggagtgccaggctgggctggggtggggtgactggtgcccttctggcataccccggcgtggggtccagcctgacttggccctccccacgcygaccttctccactcactctatcctcggatgtgtagcctggttacccaacctgttaccccctgcctaagaccccagagggtcagggccgtggatccaaggt

SEQ ID NO: 38823 - DNA, 201 bp, Bos taurus
caggagaagctggctgtttggacgtgagcctatccctgctccctccagctaggaggctggctggcgcgtctctactcatcgtcctcctcagctctaaatcrccaagtcgtagtaagaaacataggcagaaactggcttgctggcttcagaacgagctacctgctcggtcctgacgggtggctctgaccttgaggggtcatg

SEQ ID NO: 38824 - DNA, 201 bp, Bos taurus
cggcatatacagctctgatcctagttagcacagagtatttaagaacaactcatattatccttagaactcctgagaggctgcgatgcttccttgaccacagktcattcccagactttttgggaaatgaagccaaaaaaaaaaaaaaaaaaaagagcaagggagagtagagacctgaaattgacagctggggcatttccttaa

SEQ ID NO: 38825 - DNA, 201 bp, Bos taurus
ccgcggaagggggcacccttcgtagtcccaggtcccagccagagcttgtctctgcactcttgggctcaaggatgctagcgccccctctcacttgctctcayagctcaggaggccagaaatgaaaccaaggtgtgggcaggttggctccttcttgggactctaaagtagagtctgtcccaggccagtctcctcacttttggg

SEQ ID NO: 38826 - DNA, 201 bp, Bos taurus
tctcctctacaagcatgtctcctgctccctcgcctggctttccccaaccatcccaaaggacaccaagcggaactgggacttgtgagcctgatgagatgatrcctggtttcagggcctttctgggcttccgtcttcttatctgtaacctggggatgatggtacccatctgacagctttgttgtgagctttagaaataactgg

SEQ ID NO: 38827 - DNA, 201 bp, Bos taurus
aacagcatgatgtgtgtggcggggctgggaggagagcgctgcagagccggggagacgagtgatggagcaatggtggtctgtgatcaggaagaatgtagcgmtcagggctcaggcccagtagttgaggtgcatgggcttagctgctccgcagcacgtgggatcttcccgggtcggggatcaaacccgtgtctcctgcactgg

SEQ ID NO: 38828 - DNA, 201 bp, Bos taurus
tgccgctggtgtgaggaccgtggcccgtgacgcagagagcccgaatcccagagcgtccttgacgcaagtgaggcgcttcaaagaggccgctgtccctcagrcattttaaattattatgatgattttaaagaacataactttttttttaactgttgagccgcacagcatgtgggatcctagtttcccaaccagggatggaac

SEQ ID NO: 38829 - DNA, 201 bp, Bos taurus
cttggcactcagcagcgtgacctcacaggccgggacctccgggataggcactgcctggtgccacagacacggtccccccctccccgggctgcagctgctgytcctggcctccctgacccggaagttaggaggatttgctgttcctgtagaagattagtcgcaactgtgaactccaagtgccgtaggggagaggggtggggg

SEQ ID NO: 38830 - DNA, 201 bp, Bos taurus
tgaaacacttcaagaggtatggaggaacagcaagtggccattcggttatctcaagagttggggtggtcagcagagccccaagaagaacaaatctctttgaygctcaaagaacattcccttcaaggccttgtcacttctggctcctcctgtctccagccttcaaaattgtccaagggctgcctgctccccagagcatgtgct

SEQ ID NO: 38831 - DNA, 201 bp, Bos taurus
cccctccagcttgttgatgccccagctcaggggctgcctgctgacctgagccacttgatcatctccgtgacagcagcgcctgtggccactggcacccgagmgccagaaccagtgtgtgtgtgtgtgggtgggtgtgagtgtttgtgagtgtgactgggcctgtgtatttccatgtgtgtgtgtctgggtgtgtctgtgtta

SEQ ID NO: 38832 - DNA, 201 bp, Bos taurus
gcccacaagtctttcccaggagcgcctggtaggggcccgtgggcagcagcctgtgagtgacgggagctcccatcttatcctgttgctccccgctacttcargttgagatgctaaaccacacttggccagcagttcgtgaaaattttagcagatttttcttactaattacgcagcggtgatacagcacctcttcctcccatg

SEQ ID NO: 38833 - DNA, 201 bp, Bos taurus
aacaagtgcccaggtggtgctgatgttgctggtccagggaccacattttgagaaccattgcaccaaaggatggatgtggccaggtgatgcagaaagcctcycactcccagctcgctaacctgttaacactgtgtacagaccaggcaactctccatgggcccccacgttccttccctacatctccccctggatgaggctgag

SEQ ID NO: 38834 - DNA, 201 bp, Bos taurus
ccatggtcaaaaccagtgtccaccacccaccaccaccccgccctcagcatctttccttctgctcataaatggatgtgccgtcatcagaggaccccttcagyagagggctgggtttgagccaaggccccacagacactgagggttcagaggaatgccaaacgagccttaggctggagggcagggcagccggattctagtctc

SEQ ID NO: 38835 - DNA, 201 bp, Bos taurus
cttcctgacgtgctggacccgatgaagcctctcccggcccagcctgccccgggctttacattcctcccaaagctccacccgatgccagcacctgtctcctyggggacagtggccccagaggaatgaatgtctggcttcatccctccccaggcctgccctctgagctggggcttccgggccaggcttctgaatcagctccgc

SEQ ID NO: 38836 - DNA, 201 bp, Bos taurus
aaggagcccggtacagctgtgcccagcttcgccctagcaagagggcagcgatgctggctgcaaaagaatcttccagaagtgccaggggttctcccagagakagaagcctctcagcaagtaagcggactgctcatcgctttctaatccaccggtttagtctctctgaattttccatctagagtcctcttcccggccccaacc

SEQ ID NO: 38837 - DNA, 201 bp, Bos taurus
catgaccagttgctctcgccatttcgcaaatctgcaggaaagcctacctccacctgacaactctgacttcttccaggtcatctgtcctgggagtctgcccrgctgtttcgattgggtcagctgcaggcattccccgcgggggacaacatctcctcgaaggtgcttgtggcaggtgaggtctgcagaggttggaagtggagc

SEQ ID NO: 38838 - DNA, 201 bp, Bos taurus
catcagttagatctcggaggaggggaaccctgctgtggaatctatcctggatttgctttgtatacatttttgcacaggctggtgtgtttatgccaatgcgytgtgcatgctgaaacattcttgtgtcacactgcaaccatgctgagtttcttttatgctttgctttctcccttccctcacctccaaatgtggggtgcactc

SEQ ID NO: 38839 - DNA, 201 bp, Bos taurus
tgaagaggaagctggaaatgtagatacttgattagctcaggcacgaggcagcggctgctttaattagagggaccacggtggagccggtgggaaggagagcycagccgtgttttgaaggtctagttcacctgacaagtgcatgtggggggtggcagaaatcgaagcatcaggaatgactcccaggtctctgtcttgagcaac

SEQ ID NO: 38840 - DNA, 201 bp, Bos taurus
cagtaatgctcggctgggtgaggacggaagctgcaaagacaatcttaaatgtaatttattgggcaggaaaataggttaggcaaggcctggcctcttcctcygtggatatcttgagcgggatgactgcatttgcttgcagacagagacttacttgggcagtatcttttgacatctggcctgggactaggaggaagttgacat

SEQ ID NO: 38841 - DNA, 201 bp, Bos taurus
agtatctcctaagcctcagcagatgaagcagatgcagttgatacagtcatcagtcttgcatttagagggaagacacacacacaaaagtacatgagcctgtrcaaatttgcttatgattgatgccataaggaaacatgcatcagagtaaggagggtctcaaggaaggacaggatgatgtttggggaggagtatgatgctggg

SEQ ID NO: 38842 - DNA, 201 bp, Bos taurus
cagctagttaacgagggggctgagcatggcatttggacagttctgagagcgcccccctgccgcgcgaggctgggtgacatcctggcctcgctgtcacgtcrtttacatgcacttctcttggctcagcctcggcacgccgcgtaaatctacagctgcagaggccgaaatagcatataaaattgaaggatttattttgaggta

SEQ ID NO: 38843 - DNA, 201 bp, Bos taurus
gcacttgggataccttcatatgcaaaacacgttcgaccccatccttgcgtggtgtatattctcctatctaagatcacagcgctggtaatgtggcagaggcrggtttgaactgggcacttaagaccactgcagggtagtgccacttgaagttaatttccacttcccctatgactgtttcagcataggttgtgatattgtgtg

SEQ ID NO: 38844 - DNA, 201 bp, Bos taurus
aaagctcttggtggggttgagagaccctagtgaagatgacaagcagtgggcaagactttgaggactggactgaagtcaccacagtggcgatcttttgcgtygcatctgtgacccactggtgactcctctgctttccccaggttgcatgtggagatgatgcatttgaaacctcatggagccagtggctttctgtggctctgg

SEQ ID NO: 38845 - DNA, 201 bp, Bos taurus
gctgtggagcatctgaaggcctcgcgcggtaggcagttggtaagagggtggcccgctgtggagcatctgaaggcctcgcgcggtaggcagttggtaagagraataatggagtcatttaagcatttcattgctttgcttgctttaatattccatcacaggttaagtcatgctgtatgagaaattaatactaaaaatgctttg

SEQ ID NO: 38846 - DNA, 201 bp, Bos taurus
tgctccaccagtctgcagctcacccatctctctccctctcctcagagctccctattcccctgagacacagtgatcctgaactcggccagttaataacccckcagtggtagtgttgttgttgaaagttaaagtcactcaattgtgtctgactctttttgaccccatggactatagagcccatggaattctccaggccagaat

SEQ ID NO: 38847 - DNA, 201 bp, Bos taurus
cctgagtcaagccctaagtctgcttctcttcccaactagcttttgaaccctgaatttgtatcagggtgttagctgttgattctcctgctggcccttccgtraacggaaggctgaccatctcttgacaagccgtgtcctcctcaggctgcccttctgcctggtcaggccaagaccctgttcagtccatacccaaaccactga

SEQ ID NO: 38848 - DNA, 201 bp, Bos taurus
cacttttggtcggaaacaaaacttgcttccgatcagaagtaaagccgtcacagcttgtgaaatgccaggggattctggatactgcctgttggcaaatgccmctgacaggaaaggcatctcattcataaagtgcagggtgggcttcggggagaatagactgtgcaataggagggggggtggcatttttaccaaaagtcctag

SEQ ID NO: 38849 - DNA, 201 bp, Bos taurus
ctggaagccagctccccacaaaggaggaaggatggggccaagtcagcctgggcctcgagggaatatgagagagcgacctgtggctgattcacagggggccrgactgacaaagtgtgagagggagttggggatgtgtcaatcatttctccttgacaagaatttatttggggcatcagccttcaaaaaggcaacagataacct

SEQ ID NO: 38850 - DNA, 201 bp, Bos taurus
agtccaactgagagagacagagagtaatctacatcccaccaaagagctctcaatatcccactgtgaaatgcaaagaaatgaaaataaaactccatgatccrtgtaaaagtatggctcagaatttaacagaatcagtggtgcatatttctcagattcaagaatcagaagttcaaagatgtaactgaaaatctaaaattaggc

SEQ ID NO: 38851 - DNA, 201 bp, Bos taurus
gactgtcaaggagagagaaaagatgcaaatcatgaaataaaactctcaggagccaaaagagagacttctgaagtcattctagagattggccagaaaatcartgtattcaggaagtgatcagcatagacatgatcattttcttggggaaagctgtacatttggccagtcagagctctataaatcaataatgtaaccagagtc

SEQ ID NO: 38852 - DNA, 201 bp, Bos taurus
ataaagagaaaaagttgctgtacttccaaagacagtacttgttggggagaggcgggagattttattgtttccattagttatttagttaaggattctttccmccccttttttcccttcctacacaataatggagcaagagctgtgactctcacacattagaccagaaagaacttggcagacgaaagtagccgaggataaggg

SEQ ID NO: 38853 - DNA, 201 bp, Bos taurus
tggcttgagcttccttctgtgaagacttttgggtgattggaaaatgtgagagagctttaccaccaccacaagaacatctcttcggaatgaggaggtgctcrgatgagctgctgtatcattctcaacaccaggagttttaaaactgcttttgtttcttacaaataaagggctcatttccccactgtctctcctccacccatc

SEQ ID NO: 38854 - DNA, 201 bp, Bos taurus
cccaggcccctctcagctttgccagtgccgtctcagtgggtcaggcacactcacaccagagcttagctaacaagaacccaagtctgtgttgttgacttggragccttggaggcccaccgttccaagaaggaagggtgggcttttcagtggtgtgtgtgtgtgtgtgtgtgtgtgtgtgtgtgtgtacgcaatgcgcttggt

SEQ ID NO: 38855 - DNA, 201 bp, Bos taurus
tccccagtgagcctccctcccttatccctatcccacccttctggcctgggcttcctgtgttagacagcaacttctcaccatctgtccataaaattcttttkaatttttttattttttggccttaccatgtggcttgcaggatcttagttcccagaccaggggttgaacctgggcccctggcactgagagcacagtcctaac

SEQ ID NO: 38856 - DNA, 201 bp, Bos taurus
tgcccctggagacaaactttttgctcagaacctggcctctgggcttcttttggtttgtgtgaggcatctggaggaaagccctgagggaaacgtggtgtcckgggtgagaaaggtggttagcccgaaccccaaacacctcccactgccgcacgctcctgagcagaccagcgctcacccttaaatgccaaacatcagaacgcg

SEQ ID NO: 38857 - DNA, 201 bp, Bos taurus
gcaaacagtgcagcaaaggtaataggaagtcttggaaagtggcaggcaagaagagattaaaatagggaaattcataggaattctaggaaagctctgttctrtttaagaagatattaagctagaattggcttatgtcataacctgttcatgataagaggaaatctttttaaaattcaatcctctaagcataggccttgcaga

SEQ ID NO: 38858 - DNA, 201 bp, Bos taurus
tcacttgccatgagtaataataaaccctttcctctcccagtctttggcttggttgagtccgttggtttggcacataccaagaggcaaacccagttttgggrtaacacttgctcagttatgtaactatttagcctattagttattaatagctatggtcctctttgaaaaggtgacatttgagcaaaaccaaatgaaggtcag

SEQ ID NO: 38859 - DNA, 201 bp, Bos taurus
gcagacacatttccaagataggaatgcaaatggccaccatttaatccccaactgactcccgttctccagcaaataactgctctgtgtggtggtgttagtckctaagtcctggccaactcttttcgacctccaggactgtagccccaccaggatcctctgcccatgggatttctcaggctagaatactggagtgagttgccg

SEQ ID NO: 38860 - DNA, 201 bp, Bos taurus
ctttaccatctgagccaccaggggagcccagaggtataggtaggctgcacctgtggaagaagataaagtgaaaacagatggagctttagacttttattttkgtttcactgaatggagtagacagaaaatcaaaaccatttcctcagtgttcgctttctgatctcctctgtcaccttccaccaaaatattaggacagacagg

SEQ ID NO: 38861 - DNA, 201 bp, Bos taurus
gggagcacatatttagggagaagacggccatgcctttctcggaaccaaatctaatgtgtgggctgagaggcaatgggatggccagagcccagaggtcagtrgtcatggatttgggattgtccaccagagtgggacaccagctgtgcttggagggaggccccccagcgaccatggacagccagggattcagtggggctgagg

SEQ ID NO: 38862 - DNA, 201 bp, Bos taurus
tttcagtgttgtattaggttctgccatacgacaacttgaatcggccataagtacacgtgggttccccctgctcttgggcctcccccacccatcccaccackccgtcacagggctggtttgtattctaaatggcaggtgtcggggtggtaggtttggattgtatcagtttagcaaaactggggccacacattccagaactga

SEQ ID NO: 38863 - DNA, 201 bp, Bos taurus
tgtttttcacacaaactaattttgttcgctctaatcataatgaaaactaaagccaaagtttcatgccacaaaaaaaatggggccagacatttttcttcttytttattggaatgtaactgttttaaaatgctctgtcagtttctgctgtacaacacagaggatcagctacctgcagacacaggcccctccctcctggctctc

SEQ ID NO: 38864 - DNA, 201 bp, Bos taurus
ggtcattttattcatctcattccttaacaaccacctacaaactcccaccctgaagggacgagtcctgtgacacttccctctctctttactctttgtctggytgctatcaatattcactttattcaccttatttcttaagaactctttaaagattgccaccttgctgagaagagtcatttgactcttcccatcctcttgtta

SEQ ID NO: 38865 - DNA, 201 bp, Bos taurus
ctgctcctcctatcttggtatcgctttttgattccatgccagggtatccactgctttaaaatatacgtatgtaactaggctatatacatcccatgcatgtrtgctaagcaggcgtggtaagctgcttcagttatgtccgactctgtgctacctgatggaccgtagcctgccagggtcctctgtccatgggattctctgggc

SEQ ID NO: 38866 - DNA, 201 bp, Bos taurus
gttaacgacttccaattaaagccaaagaggaatgtaatatggaccaggagtcatcacatgattgaggaaagtcacaaagggcaaggtcaccaagctttttytgaaaagggccagagagtcaatattctgggctctgcaggacatgcagtctccatcacagtgattcgactacacaattgcggggagaaagcagccctcaac

SEQ ID NO: 38867 - DNA, 201 bp, Bos taurus
taagaggaaaattctcacaaaaactgctttatatattagaacatgtgtttagttaatgtataaagaagaaaaaatgtgattacttcatataagagattatycacattggctggatagacttctatttgcaggacttgaattgtttgtgaatatcaagtttaacggatgcgaattatttgagacctcaaagctggtgttgca

SEQ ID NO: 38868 - DNA, 201 bp, Bos taurus
ggtggcttctctggtggaggcacacgggctggctgtggccacgggcttggttggaacaagaccagggactgagctcatgtccccggcggtgactggcagamgaagcactgggccaccacggaagtcctcaattatcctgaagtgagaaattacctttgaaactatcggcttctttcttatctatacgttcttttaaaattt

SEQ ID NO: 38869 - DNA, 201 bp, Bos taurus
tccctattgttttcgaccctttaagtggctctgtttctccattcatttgccacacttaatacgctatcatgctctatcacgggccccactcttgcagtctraaattgtgtctggttagaaattacagccagctccctaagacatagaacctgaaagggccaagatcctaaaggacatggagacgtctaaaatgacagagaa

SEQ ID NO: 38870 - DNA, 201 bp, Bos taurus
actgaagcgacttagcagcagcagcagcaggttatgtgtgagtaggagtgactaatggaagacagcagaagagacagatctttggagtaatgaatgcactygtgtgggaggggcagagtcttcctttgtttcaccgctgcttgtcgcgtgcacacacacacacacacacacacacacacgcgcgcgcgcgcgcgcggctct

SEQ ID NO: 38871 - DNA, 201 bp, Bos taurus
acgtgctgtggcccagcctgaccacgcgcgagcatctggaggtgtttgctgccgtgaaagggctgcggcgagcggacgcccacatggccatctcacggtartgtgcgcccatgaggctcctctgtgctgtcgctgacaaggagtggggagtagggggacatctccatcttccgggagcagcaggggttgagtggggatggg

SEQ ID NO: 38872 - DNA, 201 bp, Bos taurus
agggctctcctcctcagtcccgggcagagacgacacagccctgacgtctcgggcctgctgtcccagggcaggccccagttcccactcccagctccacctcraacggcctcctgcacgattccaacaaacgaggcttgtttgtttcctcatgtgtgaaacaggaccatccagctgaccccccagtcaggtcgggtttttctg

SEQ ID NO: 38873 - DNA, 201 bp, Bos taurus
cgaagtcgactgatgtgctgggtaaagcttggactaaatgttctcaaagatcctttccagttcctaaattccatgagaataaaactgtcaaatggtccgaytgtagaagtcaggaagtttctatgccttcagggctgccagaaaggtcatggaactggaatcgcgaagctgtttctagaagaggaacagaacgcccctctc

SEQ ID NO: 38874 - DNA, 201 bp, Bos taurus
taatctacaaccagtatagtcaacccaggaaaatgctcttcaattatagtccgttaaatattcgaactccagtgggctgcgggaggaggtgactgcatgtrgacaaagcgcatgtgctacgaagcagcacagttccagcagggtgtgaagaaacgaaatctaccatcctaacagactcaattacccatcccatgcctcaga

SEQ ID NO: 38875 - DNA, 201 bp, Bos taurus
ctccacctcggtgtctccatttcttctctctaaataggaacctcgagcctgtcttacagagtgaagtcagaaaaataaatgtcctttgttaacgcctgtgytttttctcctaactctccaagagcgggtccctcaggattcccaccgccctccccgcctccgcacagtgatgtggcaacgagggtcccgtggggatgtcat

SEQ ID NO: 38876 - DNA, 201 bp, Bos taurus
tgaagtcatttccccagttaatggtaaatacaaagtcaacaaatgcacacgagcctcacaaaggcagacctgtgggccttgggtcagagggcttagaagcraattgagaaagatgaaagggtcacgtagggtcagtcggggtcagaggccatcaagagtggaggttctagggcaggacgagagcgaagatcatccccgtct

SEQ ID NO: 38877 - DNA, 201 bp, Bos taurus
aaatcactatggccttgggtgacaaaggtgggattacagactgagaatttcacacgttgctttctgatttctctggggggaacctgttgaggtgaaaaacraaggaaacagaaaggaggccacaaggtacagggaagacaaagaaatgcaagtgagtgaaaagaataacattaaaaagatgaaataaaaaagaaaaaagat

SEQ ID NO: 38878 - DNA, 201 bp, Bos taurus
tctggattccttgcaacatttgcggtcacacctcggtgagccggaatctgggagtggtagcgccagggctgcctgaggggtcagacaggccaatgatgacrtcttgttacagctgggaagctgtggtctggtcatctctgtgtgtctgcctgtctgtatgttgtggaaggggtcttcaggagggatggcacagggcacaaa

SEQ ID NO: 38879 - DNA, 201 bp, Bos taurus
gagggtgcgagcgcatccaggctgggcagtgcgcaacaccgacgtgctgggagaacctggggatggagaactgtctggcctggggactcaaggggtccacygggaaattctcatgttccgaaggaagaaaccacaggtccctccccagttttgaggttttggaagcgtgtctgcttctggactccagccacgggccccgcc

SEQ ID NO: 38880 - DNA, 201 bp, Bos taurus
cggcctgctgtcggtcacaaacagaagggactgccctgcggcctcattggaagaggagctccaggtggtggagtccaggcggtctgcacagcaagcaggtkgtctgaagaaagggccacggagcctcccctgtggttcagaaggtaaagagtcggcctgcaatgcaggagaaacgggttcaatccctgggtcgggaagatc

SEQ ID NO: 38881 - DNA, 201 bp, Bos taurus
gacccggcctggcgggccgcccccggtgtccgctgggccctcattggctgtttcgtctccatccgccaacccacctgtctgttctgcgtgcgctgtgcccrgggttcctggccccataaaatttcacctcctggtgtagaagttgtctcacctataaacatgctctttgaggtgggcctccccaggggcgcccaaggcagg

SEQ ID NO: 38882 - DNA, 201 bp, Bos taurus
ggcagctgcaggtggcgtttctctgtccagatggcctcagtgatttctgacttgtgacttctgtatctcaatcccaccaccaatttgacactctcgtaatygttttttcttgtctgtttatcttgatggtgcgcctaaggcacacagagtttaagtggtgagcctgaaagccatttcaaccagtgctagacattgaatttg

SEQ ID NO: 38883 - DNA, 201 bp, Bos taurus
aattataaacttaaaatggaagttgcattttataaagtttaatttccaaaggctgattaaagatttcagaactcgccaaagcatcaacagaattaaatcayttattaaatgcagacatactctgtaacctacagaggacttcacgtcactcaattctttccacacttactgcattctttaacttaagcgctcaacctccta

SEQ ID NO: 38884 - DNA, 201 bp, Bos taurus
ttttaattaaaaaaccgctagttatttttatttaaaatgcaaaaaaaaaaaaagttctttcattacaaaagacaaagctggccacagatctagcctcccaygtttcccagcccaaacactggacgtgaactttgccaccgtgtccaggtcgtgctgccctccgtgcgtctcagaccagcattggcactgactgtcctgcac

SEQ ID NO: 38885 - DNA, 201 bp, Bos taurus
ggctctggggggcgcggtcctgcctctgcttcactcctggtcctctgagatggctgctgtctgtcagtaatggcttcatatttttcacccatgggacagcygttctgtgaatcaacaagggggcatgcctgcgatgctgctgatagaggcagccctggaggcaggttgtggttgagtgccttgccggtgacagtcggaacc

SEQ ID NO: 38886 - DNA, 201 bp, Bos taurus
gccccgtggcaggcctcgttagctgtccggggcagcttgggtctggcagctgaccagccctgctctggggagagggcgggaccacaagcctgggaagctcyggcctccttgagaggatggtacccttccttttaaagagactcctgaccatccaagcaaagggcccttcactttgaccttcctgccgggctcaggggtggg

SEQ ID NO: 38887 - DNA, 201 bp, Bos taurus
agattggccaaagtacgagcttagagctttaccacagagccttgaaatgggggtgctttctccctgggtaactgtgtgcttggcgcctcatccgaggaccrctgacggcccgctagagcacactccagagccagacgcaccaggtgtgtgggcgcggggtcttcccaccagatcagaagtctggcggtttattcagaattt

SEQ ID NO: 38888 - DNA, 201 bp, Bos taurus
cagggcccaacttttggggagaggatgtcagctgtgggaggaaggggagtgcattcatgtggtcgaggtgatgaatgccactcccagctacagtctgctcrtccatagtcacagggcccctgatgtttggctggacatgtggctgccgtgaataagacatgtcccagcctctcttaactgttggcttaaaactcaacattc

SEQ ID NO: 38889 - DNA, 201 bp, Bos taurus
aagacaaagtaacagccactgaaatgtctgaagcagggatgggtaatgctttctgtgtgaaggccaacagtgacgtctcaggccccagccgtgcatctgtygcgactattcagctccgctgctgaagcacagaggcgtccgaagaaaatatagggagtgagtgggcacgactgtgttccatccgataaaactttattcact

SEQ ID NO: 38890 - DNA, 201 bp, Bos taurus
cagtaagaatgaaggggagggacttgcctggtggtcaaatgttaagaatccacgggccaatgcaggaggcacgggtttgatccctggcccatgtggaagaycccatgtgccttgcaacaactcagcctgcacaccccagctactaaagcctgcatactctagagcctgtgctctgaaacacaataagccatggccatgaga

SEQ ID NO: 38891 - DNA, 201 bp, Bos taurus
gaaggctggattccattgcctcaccatcctctcttagggcccttggcatcgtctgcatagaaggaggtgggttggcctgaacccacctttcctctctgcaygcttctgctttctctcccagaaatggagctgtgccagagcaaccaggccaagagcatcctcccaggacaaccgagaagtgtgagcaggtgctggggctcc

SEQ ID NO: 38892 - DNA, 201 bp, Bos taurus
aaggtgagagtggcctcgaaatatggcgtggttagtttttatgggttgcgtaatttcataggttagtgagagggaggattattccaactgtttggggaaaragcagagactgggccactgcccacattttaggttggtctcagaactgttgcagagcctcggtatgtcatttagcttgctgatgtgttgaaagtgaaactg

SEQ ID NO: 38893 - DNA, 201 bp, Bos taurus
agagtcggacacgactgagcaactgaacgggactggactggaggccccagacagtatacagagcggcacacagtaggtgttcaagaaatcatttgttgaayaaagcacgcacattgtacctggccctcacaatacccttacgtggcagggatttacagattctgacagaagttcagagaggtcacaacgtgagcaatggct

SEQ ID NO: 38894 - DNA, 201 bp, Bos taurus
aaatgggactttcctttggagaacaggattcaggagaggcagcaggggatgggggagcagaaaaaactaagggggcagagaaggagagagtgggtacatayaattacatttcttttacagtgcattcattctccactttattttttcattagcaaaaatgagaaaattctgacttgcttaaagagtcccacccagatcaca

SEQ ID NO: 38895 - DNA, 201 bp, Bos taurus
cccgaccccagggttaacctggacacggctgggctggccccagggaggtgggctgagctgttcctttcggttccccagcctgttgctgagagaagcattcrgtctcacccatggcctgtgattgctctgtcaaatcaattcgagagactataaagatataagagctgaacagcaccagcaggagactccattttttttcct

SEQ ID NO: 38896 - DNA, 201 bp, Bos taurus
acacaggaaccacagccttcaggggctttccccctccccaagacacagagtagatcaggaagggaactgggtctgagggcaaaggggccctaagaccagargtctctaattctcctaggaaccctctcttgcccccattctaggctggactagggagtttggtaggccaaaaaattccctccctgaaaatatatttatttc

SEQ ID NO: 38897 - DNA, 201 bp, Bos taurus
tctggccaacagccagcaaagagcaggaccttcagtcctccaaccacagagaagtgaattcctccaacaacctgcaggagctgagaggcggattcttcccygatcaggccagatgaaaatgcagtctagccaacagcttgactgtagcgctgtgagaccctgagcagaggtcccagccaagctgcccagaccccaacccca

SEQ ID NO: 38898 - DNA, 201 bp, Bos taurus
gggctcccggggtgtgagacttgcagtgtccaaacatggaggacaaggatgaaaaagcaggatgagctgctcccactgcagaggcctaaattttgggctcrccccttgggctcctctcatcttctttccaggtctcctgagctcatctgtcacctttctccagtttactggttcctccccggcccttgcttggacacatga

SEQ ID NO: 38899 - DNA, 201 bp, Bos taurus
tacagcctggccaagcctggccaaccccaccacatgccacagggtgctgagaacagcacatgttcttctgcagaaagtttccaactgtgcaggtgggtccyggccaaggaagcctgagaggagccaggtggcgaacagcccgtgctcataccctcagggctaagatgagacatgtctgcattctggactcagcatcccaac

SEQ ID NO: 38900 - DNA, 201 bp, Bos taurus
cctcaaacaaagatatacatgtatttaatcttcaataagatttgagcccaagaagcaatttccatattaagagaatggccttaaacaccagtcttttcagytgtgggcacagaaacaggtgttttgaagtcagtctctctctgtctctctctctctctgtggaatggccagtgaggaatgggcagaaatcaggatatggag

SEQ ID NO: 38901 - DNA, 201 bp, Bos taurus
gtttgggcatgtggtgtcagttccagcctgccgggagtcagagtaattcctttactggagctgcatctcctgggctgacggtggcccctggggtcagcatmatcacaggatgagtcagacagttgccgcccaccagtcctgctgctcctctgagtttgagtcagtaaaaaccctctgattaatactaggtgacagaaggcc

SEQ ID NO: 38902 - DNA, 201 bp, Bos taurus
gagatgacaaatcctagctttgggaccaaggggctaatcaaaagtgaaaacgacccagcctgccaggcggcctggcattgctatgccctgcccgcttctgytgtactcacaagtgccaatattttagaaaactgcccgttaagatatacgatttttttctgggtatctgcttagaaccctcctctgtctcactgctctgca

SEQ ID NO: 38903 - DNA, 201 bp, Bos taurus
tccacccgcctcccctcagccgaaggagaggaatctcgatggatttctggaccctttggtgctggatgactgtcatagactgatctggtatctgctgacaragaggaagatctgggtgatctaagtcaacgttggctgatcacctatgtgcctcccccccttccttcctcgaccatgcaggcatcgtaaactgatcgtggc

SEQ ID NO: 38904 - DNA, 201 bp, Bos taurus
taacggcagggacacctggaacctatgcccggaagaggggaatccaccggcttgcatttagtcagcgcgtgggttgccttgagccatctgactgtgctccrttgagggaaacttggaaaggaagctagggaaatgatgaccctccctgggtccttacagggagcccctttgatgagataaccctgcagggtccctcttcct

SEQ ID NO: 38905 - DNA, 201 bp, Bos taurus
ggggactctgcaccccagcccccatctattccacagaagcagcttccctccgggcccacacctatccaccacgcaccacctccgcctttgctcccgggccrtaggaacttgtagacaaggcaggcatccactcctctgtcccatgggctgtgccatctagggcaggtgaaggactctcccaaagggccacagtgtaacttg

SEQ ID NO: 38906 - DNA, 201 bp, Bos taurus
acagacccagtgatttatccacaaaactttctcacatcttgcaatgcacgtggcagcccaagacaaaggcttccacgttcaccagcgaaggctccacatcycacaccaagcagttacttcttgctcttctcttgtgggtcaaagcctggctccttctctaaacctctctattatcttcctcatatacattctaaatatcga

SEQ ID NO: 38907 - DNA, 201 bp, Bos taurus
cccaggatatatacccttcagctccctttctaactccctctcactagctgaggttccttttaatcactctcattctcaagggggacagagagccccagagygtcacctagaagaccttaccttcctggttcccacaccgtgtgcttccatgtccctctccaggagatgatggacattgtcaaagccatctacgacatgatg

SEQ ID NO: 38908 - DNA, 201 bp, Bos taurus
cttatgggttcagagtaggggccgtgatgtgggtgtgaccgtccccctctgccccagaaaagaaggagtgcagggctgcccgctgctgggccgggggccaygtgaccctgcaggctgtgccagacagtgactgagcgggcagggggtgccagtttcagcccatccctgcaggacaggtgatctagaaagtgacttctgcct

SEQ ID NO: 38909 - DNA, 201 bp, Bos taurus
agtttattcagtaacacatgtgtttctcacttcatagttgtacatataattttgactaatgcagtagcacccctctcttgtcatttactaagattgtacayagttcttcagcagtcattagtgtaaacaagaatagactttacatttcttttaaaataaagaatgaactgaatgaaattaaatcattcttgttggctagca

SEQ ID NO: 38910 - DNA, 201 bp, Bos taurus
taaattacttgatcagggtagtgttctgtttttacattgctaatataaaggctgcatacttagccaattatgatttcatagttttgtgatagattaagagkatatggatacttatcttaccaggtaagattttttttttaatttctttttgaaaaataattgatttgttgttaattgctcataaagatttcaaaaatcttg

SEQ ID NO: 38911 - DNA, 201 bp, Bos taurus
gaagcccctctctctcctatataacacccagcaaggcccagcagccctatgccttctcccagcttctccatcaggacaaggagagaatgcactgcaaccgrgaagtctttctggcctcaggagtccaggtcaccagctcccagttcttagagattctgtgtgtgtgtgtgtgtgtgtgtgtgtgtgtgtgtctgtctgtcc

SEQ ID NO: 38912 - DNA, 201 bp, Bos taurus
atatgtctctgatttctggggccacagtgtcaggaggaggcggacacaacaccctagtcactgtacagactggtagaaggttccgtctgttcagacagacrgatgacaccctgcagggtggccagagtgctggcaagacttccaggcagaaggaggtgatgagaaagctgagtgcattccagaagttgggcgtggccagag

SEQ ID NO: 38913 - DNA, 201 bp, Bos taurus
gattctcctccacccacggctgcagatgggcctccccctgcctggccttctccaatgggtgccccagcaggcgacgcagcacctggtatataggatgtgtrcagcaaatacttactgctcgtcggctttgtacttgctgctgtgttaagggcatcgtgtgtattcttctcatttaatctttacttcggggacatccctggt

SEQ ID NO: 38914 - DNA, 201 bp, Bos taurus
ttcatcatggcccttcagagcctgctgatgatgcccctgccctctttctgattaatctccttacgtgccttctgtgcagaaggagtgtgcttacctctaaygtatcagttagatttgccctggcctcagggcctttgcacttgttgcctggagtgctctttttccaggtctttgcattttattcttcttaccgctccagtc

SEQ ID NO: 38915 - DNA, 201 bp, Bos taurus
tggatcaggtcactgttcagcataaaagcctctggtggcctcccatggttcctaaataaagcagaaacatggcaccaggccctataaaaattgggcccccrttggcttcactggtggctcagctggtaaagcatctgcttgcaatgggggatccctgggttgggaagatggcctggagaagggaaaggctaccaacgccag

SEQ ID NO: 38916 - DNA, 201 bp, Bos taurus
aagcagggatccatgacttcccccatatgttgtcccctgagcccagtgcagggtataactcacaggctgcatctgcaagatggcctggaaatgcttccaargagaagaacacggtggaagcaggagctctctaaatcacttaggaacagctcattcccaagtaatacaaaactaatgaattaagagagcatgtcggcccct

SEQ ID NO: 38917 - DNA, 201 bp, Bos taurus
gggcacaggcccctcagacgcctgtcagcaacctttgagacacacccgtccgtcccatacgggggtccaatttgccacctaacttcagagcgcagagtctkggccactgaaccaccatggaagtccccataattctatatttcttatccacaaaacttgtataaaactctgctacttgtttttttaggcaatctttatttc

SEQ ID NO: 38918 - DNA, 201 bp, Bos taurus
tggtagccgggtgaagggtcactgcattttgactctctgaccacgctctggccattcaccctcccaggctgagggtcacaaagcaaaatggcagggccccmgggtaacctcgctacacactccctgggtggagaaagcgtgagggcagagaaagaggggaaaaaagagatggaagatgtggaatgaaggttcagaagattg

SEQ ID NO: 38919 - DNA, 201 bp, Bos taurus
aggtgccttcgtgtctcctggggtgtgacacagcagtgtctctcctttccctgtgtggcctcagtgggaccagtctctgggctcatgtcagggcccctgcmcaacacaggaggcaggaagccccatggcaggattagcatgtgccggggagacacacagaggctctggggtgacgagcaaggcccccccgggccaatccca

SEQ ID NO: 38920 - DNA, 201 bp, Bos taurus
agggcgcctgaggccagagaatggcctgcaactggcaggaagcccaagtcaaagatggctctgcgcactcagctgttcgagtcctagaaggtggcaaaaayaccagtggccatgcaggaatcccagtctctgccagggtggccaagagtggcaggaccgttgagagggatgtgcggttctggaaccctcacccagcgtcca

SEQ ID NO: 38921 - DNA, 201 bp, Bos taurus
atgaacctgcacaaacatatttgtctctttaactggcaggggggaaaccagaccccctccaaggtataagtagtattaggccccaggtatgcctgctcccrcagagggtagaggagactggcaggctgcagtccctgaggtcgcaaagagctggacacaacttggcgacaacaacaaatgcctgctccagagtaaaggcca

SEQ ID NO: 38922 - DNA, 201 bp, Bos taurus
tcaagattgttggatattaagacatgatgttttgatagtacctggtgcaatgtctgacgtagagtagtcatttgataagatcatagctgttgatactgctyttggtatgttttcgttagagtccagacaacaggaagagctcgctgggtgtctgtgaaaccctttccccagatgcccagtaggtggcggcagagactcctt

SEQ ID NO: 38923 - DNA, 201 bp, Bos taurus
ccatgggacgctccactctgcctcctctctcctggcctcagagctcctggctggcaaagtagagagatgctggcttccattgccttcccaaaaaaggctgsggtcacccctggccaccaaaaggcccagtcgactgaagaaaaccttcagaagtgggtgcccttgctgggggctgggaggacaagagagacttcattttcc

SEQ ID NO: 38924 - DNA, 201 bp, Bos taurus
gcactggccggtggattctctaccactgatccccaccatcatgttcaaattggtaatttcatgtaagaccccagatttctttctggttttctctgatctgrctgcccttcttctggccacaggccgagctaggaggctttctcccctctttaggtgggctgtggatcctctggttgccacaggctccaccggtccacctct

SEQ ID NO: 38925 - DNA, 201 bp, Bos taurus
agcaaagtgagcacacagggagagcagaacgtggagccagtggccgctgtgcactgccgtaggttcgtgcggatcacccttggtcctgaccccggaagtcrggtcagatctgcctgactcactcctgtgctgcacgctcaagaggagccaaagatgcacgcactgacacagacggtcagcaggcaaaaaaaatggaatgtg

SEQ ID NO: 38926 - DNA, 201 bp, Bos taurus
ggctgacctggtttcccactggcctcagaggagagtaggaggtggccttcagcccctgcctggggggacacagccaggccggccaccaggaggaggcgtgkcttcacagctcatgtgtgtttctcactgcagacagggtgggctcctgcagccctgggccctctctgagggggaggtggggtctcaggaggagtgtgctga

SEQ ID NO: 38927 - DNA, 201 bp, Bos taurus
cctacagaatgttccgcaatcggctactttctttcctcttctttttttgaaaaatttattttattgaggtatttgagcttgatttactacgctgtgttaayctgatctacttactttccagttgcatagcctcagttcaggtccttaacctcaaggcactgttgcagaaattaaatctatagtttgtgcaaataaattata

SEQ ID NO: 38928 - DNA, 201 bp, Bos taurus
atatattttttcacacctgaaaacttgaagttccctttcaatctagagattcttgctcttcaagtttgggaaatattattttattttgttgatgaagcgcycctcctcttctttatttgtggtactcttgtttgcaagtcagacttcttggactggtctccaagttattttctcttttcttccctgttttctttctttttg

SEQ ID NO: 38929 - DNA, 201 bp, Bos taurus
cacaggggcagacaccccaaagcacaccccagttctgggccctgtgactttgtcaccgcgtgtaaagtccccttggtggggtggagtgctgagtctgtgtyttccggggtgcccttcatcctcatctcttctagtctctaggggaatacaggtgggacaggaacagtctctctcactcccaagctccctgagtcccactct

SEQ ID NO: 38930 - DNA, 201 bp, Bos taurus
gcctctgctgactgtgtgtggggggaccagcccaggcaaaataggtcagttccagggtctaagcaaagctgcagggctagcacggagtcactggtctccamgcacaggcccagtgccctgggtcaccgccttactctgccaccgtacgagataagaatggacacagaggcgtccctgcctcctcaggtccagccttggcat

SEQ ID NO: 38931 - DNA, 201 bp, Bos taurus
aggatctatgattcaaggcagagtgtcttcagggcctgtggactcctttgttctttatgttcccaagcatcccgtttccttccgtctcactgctttgacaygctaggcctatcagtcctgccttaggctgcttccctcatggtgcccaggtggctgccacagcccagtcatcacactcagttgcaacaattttttgacata

SEQ ID NO: 38932 - DNA, 201 bp, Bos taurus
tctgttctctatgtctgtgtctctattcctgccctgcaaattggtgccaggagagttgaaggagacatccttatctccaaaattcttcccttttacatagwatcaatatttcctcttttttaaccccaatatcttaaattagggaggaaaaaaaaatctgtctaaaaccttgtctaagactcttataaggactcttgtggc

SEQ ID NO: 38933 - DNA, 201 bp, Bos taurus
tttatattttaaatactttctaggccaacactgtatatgtcaaacagttctgtctgttggaagatgcaggccttaggccccacttgtttgcaacttctctrttcgttataaaggactaatagtttagacttcattctatcagtaaataggcaaccattggccattttatacttggtagtgacaggatcagatttgaacatt

SEQ ID NO: 38934 - DNA, 201 bp, Bos taurus
aaaattttatgtcaaaccacgtgttttaatcccaccaggccagaatggaaaggaaggggacaaggtcagtgttggagtttcatcaacaagcttagcccccytctctaccacccactcccccagctccatttcttcaatcaatctttattaagaacataggtttgagtccacaggaacaaattcttctggctctttaaggaa

SEQ ID NO: 38935 - DNA, 201 bp, Bos taurus
attatgctttcttctgctcctcgccagggttccctgaggatggggtttaccaaactctgtcagttatcaaccaggctcctctagaggagtgtgaatcatcrccaacttctctgacttttaggctgatgctcatcctattctggtgaataattttgctgttataattatgtgaatgtagggctaagctagaggggtgtctta

SEQ ID NO: 38936 - DNA, 201 bp, Bos taurus
agactttctcagagagtaataatagtctgctttgaaatgggcgtcccctatttcaaagtcagacagggcacaaggccgagggccgtggggagcctcctgcyaatgctgggacttggaaaccaggcgagagagagcggatccgagaggatgggatttcactcgcccttgtaactatggatgaaatgtgggccagtgtatgga

SEQ ID NO: 38937 - DNA, 201 bp, Bos taurus
gggccgggggagggctgggaggtgtagcatgtcacctccggctgggtgttcacttccagagagaatctgacactcggggaggaagagcacaaacctctgtmagggccccaggccacactgacttcacaagcctatctcacaaaccacacgaggaaggaaagccatgccatcctcctttcacacactccaaaagaggagtga

SEQ ID NO: 38938 - DNA, 201 bp, Bos taurus
agatgcccccaggaaggggtttgaccctgggcaaggccgtccctcaacagctgagatgcattttgatgctgttaatatccctagcagttggggatggactrcttgcgtactgaagtggggccatctggggaccccaccacagcagtcagcacagatattagtcccctttttaagaattaatgatttgcccaaggtcacaca

SEQ ID NO: 38939 - DNA, 201 bp, Bos taurus
gttttgctgacattttgtagacacttcttggctgtaatccctcaattagctgggcatctatcaagtagttttgtgttctgaatatttttctaattaatctytgctgtacaagacgaaatcaaaaaaattttcttcgatcgagatatattacatcgctgacttctcttccatttactgggtctattactctgtcatagaaat

SEQ ID NO: 38940 - DNA, 201 bp, Bos taurus
ggcaggggcccgtggctggctgctagccaagagaatagtgaaggtgatggatggcgtcacccccgcggttacgttgcaggagagagtctcccattggcctkaaaggtggaagctgccatttgtgagaaggctcaagagaggaccacgtgcaaggaccctaacgacagccagcaagaaagtggggccctcagccctacagct

SEQ ID NO: 38941 - DNA, 201 bp, Bos taurus
tgatcatatttcatttctttcataagctacagacaaacacaaggattttttgcctctgcagtgacaagcagagaaccatggggccgtgttgagatgcagaygaaagcaggctcccttctaactgagcggctcatgtgtcttcccctgggtgcagggctcagatggatgacagaaaagcacaggccaaggaccttccaggct

SEQ ID NO: 38942 - DNA, 201 bp, Bos taurus
gtagtagcaactttgatttgtgaccatgaaattgggtcttcaataacagcatctcatacaacaacacagaaacagtactgaacttccccactggcctttaraagtccagattctacttacatttctacctatgtgggtgtaaatatttgtctcccatgagggggtagcagaagtcctaggtgagcttccaggcctccttgt

SEQ ID NO: 38943 - DNA, 201 bp, Bos taurus
ctccctcttccgttcaaaattccatcagggagaaactctttccaaccaatatttaaaggcccctctcatgggcagggcttcaaaatgtcaccagggcagaygctgctgatttttgtaaaataaccatgagcctggagttagagaaagagagcccctatatccctgagtgacagtcagtattttgtagaacatattagaaaa

SEQ ID NO: 38944 - DNA, 201 bp, Bos taurus
acctcttatgctaatgctgcggccagcctcatcatcttaccgccagcttgaacccaatgttccttggtggatgggtgatgctggtagtaaagcaaatccakatctgatggaaagtcctaggaggccacatttttacctaacatgggttcttgaacttatcttctgtaaagatgttggtgacaatggcacatcttccaggac

SEQ ID NO: 38945 - DNA, 201 bp, Bos taurus
gagatgcaaataagttaaaagctaaccttataaagtcttagtccactcttatactggaaattttcagactcctgacccttcagtgtttctggctatgcagrtacaatctgcctaaggactgaccaattattaaaggagcttgtgatatgataataatagccagaatatgttgtgattattatgccccaggcctctgttaca

SEQ ID NO: 38946 - DNA, 201 bp, Bos taurus
gcataatcccatcagacggaaataggaacaaagtctaaaacttggctgattaaatcacttttcctatcaacatttattgtgatccttcagggcctccttckaagcattggggattcaaagatgaataaaaaaacatggataatgctaattttggtaggtagcgatagttgaacaaatggccaaaagaatgcctacataatg

SEQ ID NO: 38947 - DNA, 201 bp, Bos taurus
ggacgtgcagcggggcagagaagttgagggcagcctagtggaaaagcaccctgtagcatttggcaggctccagattttccccccgcccccatccaagggarttttcacacggcctctgtataggttactctttcccttacttttaaaatatgaattttccaagtcaagattctgggaatgggagtctcaggtgcccttttg

SEQ ID NO: 38948 - DNA, 201 bp, Bos taurus
ggagtcccggagcctcggtgttaggaggcacggattcgaggccgcagctctaggcgccgcaaagacaccgaagggtcgctaagccgcagcccaacgacccrtgttgagcacgcctggcctgtgcggctgggatgttaactgtgaggtgtgtgttttgggaagaaagcaggacagacgtttctcacagagcggcaggtttct

SEQ ID NO: 38949 - DNA, 201 bp, Bos taurus
cgggtttggtcggcccccatttgccagggtgatttacagaagcctttgaacaccgacgcttgtggccctgcgaaggccagtgactaactgacctgtctgtrtatggtccacttcggaaacagaaacttccccggtggcatgggaaagaaaacaccaacctaatcctgaaagggtaactttaaaccaaagcccaaccgagaa

SEQ ID NO: 38950 - DNA, 201 bp, Bos taurus
tcagtttggtcagcaaaatgtgggtcgaaaatggtagcacctcttggagcagaagcttcaaaagccaaagtgtggttctggcctctctctgccttctgccrtgtgagcagcatgtctcagctagaaactgctcctttaatatggacttaagtggggaagaacaggggtctagctgcagcagagcctgaagcagacaacttc

SEQ ID NO: 38951 - DNA, 201 bp, Bos taurus
ctgaaggcttgctattccctcacaatcccattaacatgtgaaagcaaagatctcagacatctcagatcaaattctactagacatacagatgcttattaaaygtgttaacatgcacaaagcagtgtatatggctgcccatcccatgagcatgaagacgctgacctgacaggaggtggccctgacccattctggagccagaat

SEQ ID NO: 38952 - DNA, 201 bp, Bos taurus
aaacaaaccatgcacacacttacctccattttctgatttttccgaaataccagacagtttccaaaaggctttcatctgttctgcattcctgtaagaacaamtatcttcagctaatgtgtctagtatgatgccttccttgtacatggatgagcacttcagtaaatacattttaaatatttcactagaactagtgctaaattt

SEQ ID NO: 38953 - DNA, 201 bp, Bos taurus
tgaatcaactcttcacatgacgtgcccaaagtaactatttagtccttgatgtcatcagggaacttcaggttccaaagaattctctaggccctttctaactyaaagatccctaaacaagctgcaagtcatcactagggaatctgtgaaaaatgcacaacctgaggccttgtcggaacctactcaatcagggtcttcatttta

SEQ ID NO: 38954 - DNA, 201 bp, Bos taurus
tacctcaagtaaagggaagagatctttatcttcatcctttaacatgttccatttctggatcagtggaggcattagcatctggatatattcctaaattacartgatgaaaaacacagaaagctccactatcatatgtaaacaagtccataccgagtctatgaaaactaaaatccatttagagtaattgtataaaatttttac

SEQ ID NO: 38955 - DNA, 201 bp, Bos taurus
catttcatggttttataattcataggtcttctgggagacagttacacaccaacctctcttgctacttaagtttgtcatttgtctgcttttaaaaatacttmtgatgtatcctcatatcccaagaaagttttaagaaagagtataacattataaaaatcttaacatttggaatttaagatgaggacaggacagagaatagat

SEQ ID NO: 38956 - DNA, 201 bp, Bos taurus
tcaatggtgcgagatgatatgcccttctggggaaccacttcttttaggaccctgtttatgtagagtgagtaattcctaaggccagattcagagctggaatrtgatttctttttgtagattgctttttggtgtcctctgcagcgcttgttcctcttggtgacgtttctggccattgcagatgttgttcttatcagttacaag

SEQ ID NO: 38957 - DNA, 201 bp, Bos taurus
atgcacaggaaagccgcctacaacaaagaattatctggtccaaaatgtcaaaagtgccagggttgagaaactctgcactcagtgttacatctgggctttcrgtttagaaagaatggttaccaccagcataatagaagcatgtgtaatgatagcacccagagagatatgataaaatttccctggagagtagggagggtcaca

SEQ ID NO: 38958 - DNA, 201 bp, Bos taurus
acaataaaatattttggacacattttaatagtaatatttcttagggggtgggggagggagtaccaataaatgaaggaaataaattatatattgctgaaccyaaagtatcctttcatagtttactgtgcatctctttataattaaaattttgagttttctttgttttcaaaaactaattgacaatggaaatttcttttaaac

SEQ ID NO: 38959 - DNA, 201 bp, Bos taurus
tctgatgggcacaagggtgggaggtttcttctgggaaagttagtgtgagatgggtccagctttagtgcagaaaacagctatatatggcataatgtcaaagratatactttaataacactaaattagggctaaaaataacaacagtagttaaaatagctggtgttcattgtgtgcttactatggcattgtgcacaggtttca

SEQ ID NO: 38960 - DNA, 201 bp, Bos taurus
ccatggcctagggttaaagacccccgtgctagaggaaaggaaattctgttgggcgaatattaggaaacgcaggcacggggctacacatgaggacagtgacrccaaggcaagcagacaggaggccgggtggagcaaaggcaggtaggtactcagcgacggaggctctggagataaggggtggagtggggcacgggagagggt

SEQ ID NO: 38961 - DNA, 201 bp, Bos taurus
ccaaaattgaggagtggtactttcttgtaccatgtcccaaattaaagaaatggaaatataggcagagagaaccttgaaacaactccccgccctagtccctrtgaatgaataccaggccatatgggttttataaggtacagttgttagctaaagacttgtctaaacctgtaataaccctagttttattaccatggatcacta

SEQ ID NO: 38962 - DNA, 201 bp, Bos taurus
ttagttttgctgtgtcatttcagctgtggagctttttggcttgttgcagtagttttccaaatcctgctcttggagcttgatggagattttctgaggcctgmtttcctgttcgcatatctgtgacatatattcattcactagatttcataatgactgtctgttgacagttctagaggtgggtctggcctgtgtatatcatct

SEQ ID NO: 38963 - DNA, 201 bp, Bos taurus
tggccactcccaccccaccactgatcacctgatgcggtgggaggggaggacaggcagtcctgggaggacacgtcacgtgaacaccaaccaatccatcactyggcagggtgtcctctgtgggccgcagcctgggctctgggcttcccgggactgagcctgcctttccctcccttctctttttttagtcactaaaagggatcc

SEQ ID NO: 38964 - DNA, 201 bp, Bos taurus
cctcatccggatgagaggggagacaagcaagaggggcagaagatgaaccgctttccctgcggaaaggctgcggcacacaagcagggccgagcccccggagyatctccatcttgcttcacacaactggtcccatgggcaccagccaccgcagccatggtatcagagtgacctctggaggaggaggccctgctggaatctgag

SEQ ID NO: 38965 - DNA, 201 bp, Bos taurus
tggtgttcccacacccatgccaccccagctgctgaaggctttgaagtttctagaaaagccatctcctccatagtgacttgttagggatgggcaggcctgarccagactgggtctcttctgcagtaggaccaactgtcctcaaacagtagggcagaatgacagaaggaatcttgggtctcggctgatatcatggcgcctctg

SEQ ID NO: 38966 - DNA, 201 bp, Bos taurus
acagaagtcagtgcaatgtagttgccacaatccttctagactgaaattaagcatgcagctccttcccgaggggatcataacagcagttctgtcagaggccmtaatgctacaggcacactgaaagcctcattcattcattcaacaaacatttactggctgtccacagtgtgccagagactactggcctaggagaggcaacag

SEQ ID NO: 38967 - DNA, 201 bp, Bos taurus
gagactggtattggtgggcagaagatttcctttggaaaattcttggaaacaacacttttggaagggaaaagaggatgcaggattgggcccaaggagcccayaggctggaaaccacatcagagaaggtttcagcagctccactgggaagctcagaagataaaatggcctttcagaggggtcattggttggggcagaggttgc

SEQ ID NO: 38968 - DNA, 201 bp, Bos taurus
agtgccatattctgtttaagctttccaaaatttacattaaggcgattcttgaaagttataagaaattgctctaccaccttcaagccattgcaaatatatgyacattgcatcaaatgtgcatataaaccaataaatatctttgttgctctctaattaatcacaaacaattacacataattatttcattaagtggaaatttta

SEQ ID NO: 38969 - DNA, 201 bp, Bos taurus
tgcgtgagagagcggcctgcgccgattcggagccgaagctttccctgccaactcctcggcttcgggatacacttcggcccagatccttgctgtcccaactygcctgaaacctccgggattctccggtaagcctaggcacgtgtcggcgaacgcggcccctgattggtcgatgttgagcaccacgcccccctaactcagcca

SEQ ID NO: 38970 - DNA, 201 bp, Bos taurus
gctcatttagagtaaaactcaaaatcctgacagtggccccacataacctgtgcttctcccgctcagtctttacctttcatgtaactgctcctcttttctcrtcccgtttcactttggccccctttgctggccctcaaacatgtcagacatgattttgcctgaagtacttctcaactgctgttccctctttccccacaaatc

SEQ ID NO: 38971 - DNA, 201 bp, Bos taurus
ccatgtgcagcacctggcttctgcagtacctggtggccagcatcacttagcacccccatatagaaggcttcctctggcacccccaaagtttctaagcaaartgctccaagcttacaccttcttgggttgcagctctttaatttagccaacctttgttgtccagggccgtgccttctctcttgaggtccagacctcagtcct

SEQ ID NO: 38972 - DNA, 201 bp, Bos taurus
aaagacaagctggaaagtggtcactgtactgacttacctttctggcgttcgtgggaacattacggggagggagggaaaggggaatttttccttttcactcyatgaatttctgtactgtttgaactttttgacaatgcgcacgcatttcttatttaaggataaaacaaaataggcgaagaaaggaaaagaaaaactagaggg

SEQ ID NO: 38973 - DNA, 201 bp, Bos taurus
aactgaggttcacaaatattaaatggaaagttccagaaatagacagttcatacgttctgtgtgtgtgtttgtttatttttggctgccccgggccctcatcrctgcagcaggctttctccagctgcggagcgccgggtggctgctctctagttgtgctgcaaagggctctcactgcggtggcttctgttgcaggccgtgggc

SEQ ID NO: 38974 - DNA, 201 bp, Bos taurus
gaaaggtgacaatgattactttaagctggatttgcctgctgtaactcaactggtgaattaactgatcagggaaaactgaaagaaggccaaattctcaaccycagtatcattgccattttgtgcaggataactctgtgtcgtgggaaggctgccctgtacattgaaggacgtttagcagggcctctgtatactaggtgccag

SEQ ID NO: 38975 - DNA, 201 bp, Bos taurus
gtggggtagaaggaacatccttagaaagaaaggaaggaaggaagaacatcctttcgagtactatgtgatactgatttggccatttatcaatgtgaaaacayatttgtgtgcatacatgctcagttactcagtcatgtccggctctttgctacctcatggactgtagcctgccaagctccactatgcatgggattatcctgg

SEQ ID NO: 38976 - DNA, 201 bp, Bos taurus
tgcacgcaaaccagatagctgaatggcacattgtcctgagaggaactgggtgccagatcttcaaataggtttgtgaccctcttttcctccccaaagtgaamcatgacagctttatttctaggaacatacaagaaaagtggggaaagcatgttgttatctaagggggaacttctcacacagattctacttgtgggcagagtt

SEQ ID NO: 38977 - DNA, 201 bp, Bos taurus
ttggggtacaatgaggaaggctgtaaggaagggtggggtcataggatttctgagattccttttacatttaaaaccccaagcttttctgttgttactatatwgagtggttttatcagcacaatcatccttccagctcacaaaaggtaaaaatttggcagccacaaagtcccttcttcatttgcattgtagtatccttagctt

SEQ ID NO: 38978 - DNA, 201 bp, Bos taurus
aattccttggaactgaaaccgattctttaaggtaaagagcaagaaagtagtactgatacacaaacctgacacacagagttttaaaacttactaatccaaarggatctaggctagaggtggaaataatctcaaaaaaggtacagtgagtgcacaaatagtagctccatcaagaaagacgaaaatgaagaagacacatttcta

SEQ ID NO: 38979 - DNA, 201 bp, Bos taurus
ggttgctttatcacttggaaagagatggggaactcatttcacatgcactagaatagatatgtaagaccaagaacaacagagatgaaagatacacatttgcrttcacagtcagctcttaatgatctgtgtggaagaaaaagaaacgtggataatttaaaacaatacacattatcttttcttcacttaagaatttagtcacaa

SEQ ID NO: 38980 - DNA, 201 bp, Bos taurus
cccaaacctcgaagtcatcctcgactcctctctctcactcaacaacaaaggcttcctcttaaagtagcagcagaatttgaccacttctggaccctcatcaygtcggcctgtatttttaaaatagtttcctctctgactcactgctttggcccatgtctccatacaatgcattgtctacacagcacccaatgtcatctatta

SEQ ID NO: 38981 - DNA, 201 bp, Bos taurus
catgagaattaggacagagagcaaggcctgtggaagccttggctgcccatcttgcctggcacgtctgtggaataaccctgctatgccagggctctgggaaygttcctttgatttcagaggtgtcctcagggcgagtcacatgaccaggttgtcctgatagatagtaaactccaagggaccttagcaccagggctggcagat

SEQ ID NO: 38982 - DNA, 201 bp, Bos taurus
gcagctttataattcagcaatcaaaacatatttactatcatgcagaagaaaaaaaatgttaattccaagggaggtaaatgaagaatgtaaaaaattcctcygaaacatataaaatacttttaatagcctctctaatatttgcgaatagttagaacccctttccactcatatttggaatgcattggcacatttgttgtttaa

SEQ ID NO: 38983 - DNA, 201 bp, Bos taurus
taagtcagtgaaatgtggacatataggaatgattacatcagacgtcagaggatggaatttagttgtatcaaaagagggcaaagaatactatcctttcatcrttcttgtttttgaaatgtctatccctttcttattattttattgtctgtgatcattgcagaagcatcagtaattacagagaagctgaatagtttctctgga

SEQ ID NO: 38984 - DNA, 201 bp, Bos taurus
acactatgttagtgtgaacataaaaaaaaaaaaaaaggtaattttcaacattttgttactgactcaaaagccgagcaaaataaagttaagagaaacagaarcttggttaaaagagacatctgatttttcaaactttatttttaacttaaggctttgacggtggggatttcagatttgaagtatagtgagtatgaggctata

SEQ ID NO: 38985 - DNA, 201 bp, Bos taurus
aagtgagaaaatatgtttaagatgactggcacttgtagtgagcattcaataaatgttgcctctaactaggtaggaagattgaggcccagggaaatcataayatgatcaaggtaactaaggtagctggttcaaggctaagcaggattagaatgaaagtgctacactcaacataccaacaaatttggaaaactcagcagtggc

SEQ ID NO: 38986 - DNA, 201 bp, Bos taurus
atgatttggggtaagaaatgtggaaatctgtggatagtaaaaaaaaaaattgaatttaaaattttactgcatcttcaatgatgtaccatcttaacacaccratctcttctaccatatatacaaagcagaagaaaataatttcatattcaattttaaggacataaaggctgtctaactatttcaaatgaagtacttattctc

SEQ ID NO: 38987 - DNA, 201 bp, Bos taurus
ttagtttcccctatgaacctcgagagatcccagcctactgataaatgatgaatttacaaatttagcatagctttgtttgtttttatttgcattggttgtcrcaggtgtcatcacaactgtttcagttcaataatagcaattgcaattttgagaattatcgtaaacatctgattttgaaagcattttttttttcttttagaa

SEQ ID NO: 38988 - DNA, 201 bp, Bos taurus
cctgttggcagatgaggaaagtaaggcccgcagaggggaaagaacttgctccaagtcacatgtctattgcttagggaagctgacccactgaaaaacagttycggcctcatttgaaaacccagtgtcttttgattgaccatattgttctgtggcagacgcctgtctgtggaccttttggaaaatagcttagcgatatcacca

SEQ ID NO: 38989 - DNA, 201 bp, Bos taurus
atatatgattgaatgaagtaaatgctcatttttgtgtttaataaaaactctgattcttctattcaggctgatttttatctgtatcttcaatttccacttamctatggtttggggaaatagagataacttggatacctaaattctgtctacaagtatttcttgagaatctcttggtcattaactctctagaatgaaactggc

SEQ ID NO: 38990 - DNA, 201 bp, Bos taurus
ctttgtgaagcctttccacaaatggacaggattcctctgtctttgaattcctgtggtacttgctatatagctctttcatggtgttcttctgtgaatcattygctttactccagagtgctcatctgagcttttcctacctctccagaccctgcaccatattgtaagctctttgaaacagtggccacagtcttagctcataat

SEQ ID NO: 38991 - DNA, 201 bp, Bos taurus
ttcaaagtctggattcctaaccaccatatcagtgattctcaaacttctatgggagtaaacatcacttgagaagcttcataataatacatcaggtggccaamgtattggatttcctttaggagtgattggtgtgatctccttcctgtccaagggactctcaagagtcttctccaacaccacagttcgaaagcatcaattctt

SEQ ID NO: 38992 - DNA, 201 bp, Bos taurus
tccttggaggtgggttctttttccctgcacctctctggcattggactgggccaagcacattgctttggtcaatggaatatgaggagatttgatgtgagccmctggtgagcaagaggcacagaggccttgtgagtttcatcagccctcttgtattcttgacagagtgtggtccactggagaagggaatggcaagccacttca

SEQ ID NO: 38993 - DNA, 201 bp, Bos taurus
agaggagagtggtcccagggtcctgggaagatgagtctgggcctgcaggacgggagcttgaagctgtgttgagctgtaagttacaaaggcaccctgtggtkggtagtgtagagttcctgtatctcttcatctcttttaccagtggaaagtgcctaatatgtcctcatacactcttcccattgtccctgctctgagataatt

SEQ ID NO: 38994 - DNA, 201 bp, Bos taurus
gtaaagtgaaagaaggtttgttcagggaggaagcacactctgcagacaggatgtgggtcatctcaggagtcaggagaggcatgagaggccccagggtaatrgggttgtcagtttttataagggtgggtatacttataggctaatgagtgggaggagtcagccagctattttttggggaagagatcggaatttccaggaatt

SEQ ID NO: 38995 - DNA, 201 bp, Bos taurus
atggggttaccatgagccagacacgactgaagcgacttagtgcatagacagtgaatgagaggggattgatgtgtgatatttccaggtctgtgctctaaaamtttcccctttattggccatgagctgccaactggacacggacttctcccacttctcctttcttgacgtgaggggaaacagcaatgtaactatgctaagcca

SEQ ID NO: 38996 - DNA, 201 bp, Bos taurus
gagcacttcctgcctctgaatctacccacagctccccattgctgccccttaacatgaaaggtgaaatggaaggaagactcctggtacaagcaggttagggraagagaatgttaaacatggctttaacattgccttataagaactactcatagtttttttaatatcctctctcagaaagagatcctcccatttctgatttct

SEQ ID NO: 38997 - DNA, 201 bp, Bos taurus
cttcacagtcctcctggggatattgtgttacctctgcaccatctctcaatcttttttctttctgaatcattttaattcaatttatgaaagtcacatacacrtgtggtctgaagcaatgggtagcttttcactgttgaagcctttccttggcaggggagagacagcctctgataatggcttcccagatagctattcaggagc

SEQ ID NO: 38998 - DNA, 201 bp, Bos taurus
aggagcccttatttttgctgtttgggcagagccccttggagctgatctgacacttcaaagcagtcccaagggtcttgcagtcagagaagctgaaactaggratgaacctgatgagattctgaaacagaggtggtccctgagaatgttcctttctgcagtggcttatttgatgattttattccttcatgaatgatgtcttga

SEQ ID NO: 38999 - DNA, 201 bp, Bos taurus
tacccacttcagtattttggcctggagaattccatggacggtacagtccatggggtgcaaagagttggacatgactgagcaactttcacatcaagtgttcrgctatattttggccccaggctattttctaaattagataattgtgatcaatagtcagcttcatcactgttgtccttgttgtcaccatcatcatcactggac

SEQ ID NO: 39000 - DNA, 201 bp, Bos taurus
aggcagattctttaccacctgagccaccatttgagaagtaacaatggagaaggtccaatttttctcttagtcctgaggaatagctttcagtatgtccaagytcacagagtactgcacttcttgaaattattttgtatacatctatggctggtgaaacccctggtggctcagatggtaaagcgtctgtctacaatgcgggag

SEQ ID NO: 39001 - DNA, 201 bp, Bos taurus
agcctgatataaaatattagtaatcattctaaagcttcaagaaattaatgtacacatgtacacacaaagacaaatttatgacagaaggctattatttcackgtttaaaagaattgaggttaaaaagcatggttaatgtcagattcaggggtagaatttatagcggaaattatacctttcacagctaaatcctcccctaata

SEQ ID NO: 39002 - DNA, 201 bp, Bos taurus
gagactctgaataatgttgtcttttgtggaaagggtttagcccttttctctgtaagatgaaatagaggtggccaccttaatccagtcatggcctgagtggygtcatggatgagttacagttttggcaaggctctgtctacctctgtatttctctcctcctaagataagtgccccagagttccagataaaatggccctcttc

SEQ ID NO: 39003 - DNA, 201 bp, Bos taurus
gcaaatgaggtcccaagacaacagtagccatgtctttattacaggcctgtcttccaaaatgggggacatattcaaattctcactgagcccctgaggcctcrctaatgactaagtctatttcttctaactaggatatgttcaggaagttcaaacatccccagataaattttccttggagctgcacatatggcaatgaaaaga

SEQ ID NO: 39004 - DNA, 201 bp, Bos taurus
ccgtctccattcccacctttagacttgcttcttttgcttgcaagttgactctttcctctcagggagggagtccatcatccataagttcatcgttctcatcrtttgcttggagaaaggccctccaaagtgttccctagcaaatccagatcatagcatctgtcacatgtgcccacacatttgttgcttcttgacaatggaaga

SEQ ID NO: 39005 - DNA, 201 bp, Bos taurus
gctactaacttacacctggattcatttctggaagcttttagttcaaataaaccaacatcagtatcttgttcaaaggtctttggattgagtatcagattccytggttgtttcttggcgtgtggggccctttcctacatggtacggaaagatgccttgggacaacatgtgttggaatgtgagggaaataatgtgcactgacgc

SEQ ID NO: 39006 - DNA, 201 bp, Bos taurus
tccttgcattgaatgtaaacaataaaacctctttatgaaggctttcctactttactcagaagtaggctaattcatttcacatatacctgtaatcaaacatyaggcttaataaaagtgtacgtttattaaagagatgattatgtaggttaagtttcccatagtccacctgcccctcaactatcaaccttcagaagaaaacta

SEQ ID NO: 39007 - DNA, 201 bp, Bos taurus
atggccgcattccacaatcatagcctcaggccctttcttccatcaggttatctgtcatatttatggttgacctaaaatcccatctctttgaatagccagamtggccatggaaattttagtgcttcttccctctccttcctatattttagtttttctgtcttcactttcttaacttttagatgtttgaaactcttgtttttc

SEQ ID NO: 39008 - DNA, 201 bp, Bos taurus
ggaaaaccaggagtgtgtgatcctggaggccatgcaaaggaaagtcctcacatagttactttcttgtaagatgattgtgcaacaaaggaaaaagctttgcyggacagtcctctgtactgagtggcctggatccccaatctttcaaaagcccctcctagcagcttgataacaaagtttcccagtatggaatcagcaacactc

SEQ ID NO: 39009 - DNA, 201 bp, Bos taurus
attattataatatttactcaaatatcagtagaaaactgaaagataagactttccacagtgtgagacagaatgactattttattggcctttgaggatttatkgttatcttaaattgcaaatgcttatgtagtgcaggcatgctaagctgcttcagtcatgtccaactctttgtgatcccatggactacgtggcctgccaggc

SEQ ID NO: 39010 - DNA, 201 bp, Bos taurus
atccctgctgagcccagacttctagtcaaccctgctgagatatcagacatgtaagcaaagccatcctgggccctccaggccagctcaccccacagttgaawcagtcagttcagttcagttcagtcgctcaggtgtgtctgactctttgcgaccccatgaatcgcagcacgccaggcctccctgtcaatcaccatctcccag

SEQ ID NO: 39011 - DNA, 201 bp, Bos taurus
atggtccctagttaggtctctagggtcacaaagagtcagacacaacggaagtgacttagcacacatgcacacgtgagcgcagcttggcagagaaggctcayaattgtgcagttctggagagagaggtctaccagacagggagcccgtgaccctcagggcagaatgagaccccccggcagagaaagcacaagaccctgaaga

SEQ ID NO: 39012 - DNA, 201 bp, Bos taurus
gttccaggagagttgcagtgttttgttctccatgccagttcattagcagcagaacggctgccgggctgtaatccaacctggctgacatcagctccccagtraaagaaggacagagctggagctgcgtctgtgcagccaacagggatcaggagggctcggctgtactgacacgttggcaaaaaagaaaagaaaaaaaaagat

SEQ ID NO: 39013 - DNA, 201 bp, Bos taurus
cttgggaaagtcctgaagcagaactcacactgagggtttctgctaagctctcttagaaagcagtcctagtcagtatgctgccgttttaatcgggatgctcratgcagtgatgaaataaaggaggactgaattcttaaagttcacatttaggtaaaagtttagacatcttaggtgatgagtgtgaggcatgatcttgatgaa

SEQ ID NO: 39014 - DNA, 201 bp, Bos taurus
agcaagcttttggtttgcacttaaattttttttcactgtgttataattatttttaaaatattcttaccctttttctggtctttttggtatattcttcttarggattatagtctgtgcaagaaaaaattatttttgtatgtgttgctttcagttgttaatggccattttacagtgcacattatacagcatattcttaactgt

SEQ ID NO: 39015 - DNA, 201 bp, Bos taurus
ttgcttttgagaagaaaaagtcactactattccttcaagaagagaacacaaaggatgtttgatgtcagaagctacttaaaccctgggaggattcttttttkttgttctctataatctattcatccctgatcatttttgcaacacagagaacattaggttaggaaacaatcttaaggtattttcattgtctcctgtcttcag

SEQ ID NO: 39016 - DNA, 201 bp, Bos taurus
atttagatttaggaagtctaaagtggaggcagtatgctggaatttttatacaaagctgccagatgattctactgttcatctaaggattagaaccccattgytaaaggactacctcctttgtatgttctcttgctgtttgcactcaggaaacattctttggatcaataaatatgaaagggtcctttcactgttgccagggca

SEQ ID NO: 39017 - DNA, 201 bp, Bos taurus
ccacactcgctagcagtatataagagttctagttgttccacatccttaccagctcttgttattgtcattatgtaatgacaactatgaaatcatcattgcakgactatgtcatgttagtcattcttataataactgataaagaggaacccttctcttaggtttatgactatttggggagtgctgttctaatcttctatccat

SEQ ID NO: 39018 - DNA, 201 bp, Bos taurus
tgttatggagtggcaagacacactagtgggtggggggaaggtaaaagcagaaaaggagacctggttgtgccacagtcaattcatgtggaaggaacataaaygggtgctcactgactccatcagcctgccaaagagaatcctgaactttcaaatccaataccttattccttcctctccaaaaattcttttttgctgtttaga

SEQ ID NO: 39019 - DNA, 201 bp, Bos taurus
gctacatggagacaaagtgactgtcttcaggccaggaagagcattctcatcagaaaccacaccctacctgattgatgattttggactttccggccttttargctgtgagagagaaaatgtctgttgtttaagctgcccggtctttggtattttataaggggagcctgagctggctaagtcagggagacagcggccagaaaa

SEQ ID NO: 39020 - DNA, 201 bp, Bos taurus
ctagtggctaatcccctagtttttggactcaaccagaaccagctaatagttctggtccattccttgttaatcacaggactctggagaataatcacttggcrgtgttgcagtttcttctccacagttaaggtaagatacctacttcaaggggttttcatggggattagataacatgtgtcatgtgtagaacgtgcttctcat

SEQ ID NO: 39021 - DNA, 201 bp, Bos taurus
ttcgcagaggtgagacctgcagttccgggtgagaaatgtcaggcagggatcaggaaggtgtcttcagagcccactgaggcctcctcctaactgtgctgtcmagtctagacaagcttcttcagcaactgggtggactcatctccagctccaggcctcctttgtctatgtctcaactgcttagaacttggcatggaaaagaag

SEQ ID NO: 39022 - DNA, 201 bp, Bos taurus
cagctctgagacactgcagacatcacagtcagtgggccaacacaccagctcaaggactactggggttctggaggcagaggtcccacaatttacctctgccragcaatgaaccatcactaggcccagaaccccttggccctacccaccagtggttagacaccagctctagaacccctgggccctgaagcaagaggccatgag

SEQ ID NO: 39023 - DNA, 201 bp, Bos taurus
tgaaggccatgagaatactagaacctcattaaaagtttccatggggtgcatgcttagctctgttactttatgatggatgtgagacagcaatgagctgttcygtaagtgtcctcccagtggccaggcatgccaggagaacaattcttacagttattacctactgagattttaactgatttccgtttgtgcaaatattgctgt

SEQ ID NO: 39024 - DNA, 201 bp, Bos taurus
agatactttgaaagctttttaggaaaatgaggaagaaggagatttcttttccttctaataatgcaacagtttaaggatgtaggctgtattccttaggccartgatcaggtatgcttaagtggagggagatagtgatattgttgacccatggtctgttgcttatctcaggcctggggaaataaacccagggctaagggcctg

SEQ ID NO: 39025 - DNA, 201 bp, Bos taurus
aggccgttcctggagaaggggttagctgtgggccccagcagctgaccctcatagcagcagggggtgagagactcctgaagggggtgtgggctgcacagaayagtgtcactgaacaaggcctgcataacagccctacacaggaggacatcaacagaatcccaaagaagcaaaggtcctctctcactcttccagtttttaaaa

SEQ ID NO: 39026 - DNA, 201 bp, Bos taurus
ccagaattcctaacttaagagaatcattactatttgacctgaatggcagattcctgagaagttccattttcaaaatttgtctttatttggcctgattcagmgctagatctgtgaaagtaactgtattccaggggcatttttttaaaaaaaaatttcattggccatcattttacactaaagaggtctgaagcagcaacacca

SEQ ID NO: 39027 - DNA, 201 bp, Bos taurus
tgccttagggagcccatgcctttgtcaccatgttctaagtctcctgacagtgcctgggaccagtggcgcccagcagtgccaatagggagatgttccctgarcctggctatgggcctcctatgctcttctcttctctgcagcactcagaatgaccctcctccacagcacaggcagggacagaaagtcactctggaatcatgg

SEQ ID NO: 39028 - DNA, 201 bp, Bos taurus
cagaactttctcacagtcaaggtcaagtccaaggtatgggcagattcagctcctggtgagaggctgcttcctgactgacagagggccattgttgtgatttyacatgacacagagagagagaaggagaaaatgtcaattatatcgaatcccatcatgagagctctggccttacagctgggttatctcccaaaggctccatct

SEQ ID NO: 39029 - DNA, 201 bp, Bos taurus
agtcagagaaagttcatggaaaacaggtgctcacaactaaaaagtcactgttacatctagcctttagttacagtcataaaaaagtaactttcagttttctstagtaatgggaaacaggatagcagggatactgaaaatcctcaataatcccaaagtttccatttgattatgttacaaacttctttacctttaaaataaaaa

SEQ ID NO: 39030 - DNA, 201 bp, Bos taurus
gccgcggtggcagctcgcgggggtggaggcccgcgctgccccgcacggtccggtagggaatctcagaggggtccctggggatgcctcatgagaggtggtcktgggccaactcctgtgtgtgacattggtggggggtaagttgagcgccggggaatggacgtgatttcttaggctcgtctgtggtgcaaaccaccgaacaac

SEQ ID NO: 39031 - DNA, 201 bp, Bos taurus
atactaagatggaactatgactattttggaatactcagataattgttgcttctttgggtcttttcattagattttaagatgtttctgtaatttttattttrttctagctgcaacagatcaatttcatgagcctaatgcaaatagtaggatcatcctttgctaacctcccagatatgcatcaacttctacaacagtcccagt

SEQ ID NO: 39032 - DNA, 201 bp, Bos taurus
cctgtcagcactgtataaaaagtcacagaagcgctgggctcgcgcctcaaaccaaggaggtgtgtatagagtatgagagagaagagactgtggtgagcccrtggttggtaccttcagacatccgtgcgattctccacgagagtcacagttccctgctacaggtatgcattactccaagttgcagtttgcctggtgattatt

SEQ ID NO: 39033 - DNA, 201 bp, Bos taurus
caatatgatacctaatcaattttaacataaattaactagactgaatcactgtactactattttcagaacatcagtcttgcagaatgatccagaaataaagrattcttgggacttccctggtggtccagtggttaagatgccacacttacaaggcaggggttgcaggttcaaacccgggtcagggaactaagatcccacatg

SEQ ID NO: 39034 - DNA, 201 bp, Bos taurus
agcacgcaatatggaaagagcatctcaagtaaagtcatttccttggcaacagctctcactcatgttcatctcacatacacatgcattgcctttggcctgakcattcattttgattcagtaaccattagctatggtatctttttttttctttcaccgttccatgcggcttgcggaattttagttccccaatcagggatgaac

SEQ ID NO: 39035 - DNA, 201 bp, Bos taurus
gcaaagatatcatgtaaaactaatttttttctttattgaaaatacatctacaaagtaacgcttctcagtccacactgggtacaagtgatatgcagagcctrtgatgggctggcgagagggtcatctcagaggatctgctttccctaagagatggttagtattaaaaaagatcacactgtgtaaccgagttaatttgacatg

SEQ ID NO: 39036 - DNA, 201 bp, Bos taurus
tgtcttgtagaggctgggggtgggggggtcttcctacctggaagctgtgctccctggagtcaaattcctaaggactagacttaggataatgtagaaggtgmgagtggggacatttgctgggacattcaaggttataaaactcctggagaactggaggatcttacttcttttgtatggttgtttagtatatcaccacagcca

SEQ ID NO: 39037 - DNA, 201 bp, Bos taurus
ttactctgggcccttcagggttgaatgacctgccatgatcagagctgttttgtaggacaccgcatgaggagtgctaaggacggccagagagtaaagatctrattgatctttatagtggtctccttccccctgtacccctagcttgaatccatgcccaagtagagtaattcccttcctggcccctttccttgttccctactc

SEQ ID NO: 39038 - DNA, 201 bp, Bos taurus
gaagagtaaaaacaagatattatacaaaggatggacagtgcttggcacagagttagagctcatgacatgtcaattgtggggaaatgagacagggaaggacragagggactgggaacagtctcctcaaaggatggtctgggctggagcgtttgtccccaaacagacttcctcgtgccacctgtctagatgcagcccatcctc

SEQ ID NO: 39039 - DNA, 201 bp, Bos taurus
ccctgtcacgagaacataagagagtaacagtgagagagagaagaccagctcaacaaggacgtttatctcatttctagactcagaaggcaatttggaagacygaatttaaatgtcaagaaagtgcaattttaagctatttctcattggcttaagaagataagatttaaatatttttaatttgaattttctacaagtctagtg

SEQ ID NO: 39040 - DNA, 201 bp, Bos taurus
aatctcaagcattttggctctaagtggtggctccacatcttttcttccaatggctgtttcttagaaccaaattcaagcttccatatttctggctcctactytagcattcatgtccaaagagaagaatttcagaaatagcttggattgactgcctattaggaacactccacactcacatgcatggcactgggccagaatatc

SEQ ID NO: 39041 - DNA, 201 bp, Bos taurus
cctgaatgaccatgtctgcctggatctagaatgagggttgaggatgactctggtactggggtcatgttttcaatgaagaaagagattcccaccacttcaaytttcctcttccataaaacattgtgatacacgaaagctctgggttgagacatgggtgctgcagtcttaagtacctcatgtgcaatgtgcaccattatggtg

SEQ ID NO: 39042 - DNA, 201 bp, Bos taurus
ccagcaaagtagaagaggagacagaataaggtgcaaaaggtgttggatgtaggaagtcttttgtttagagaaaaaaaggagtaggaatgggggaggggcckgaaggagcccagatggcgggggttgctgggctgatgtgcttggagttagactaggctcccagtgctaaaaggagctgactgtaatagaagtcctggctct

SEQ ID NO: 39043 - DNA, 201 bp, Bos taurus
ttcctgaaataaggagaacaatgaggagcccaactatggttcagtctacagagccaggggaggcatccaaatcgaactgggatgtcctgctgggctgagargatagacttggatttgagggaagggcagcttcactggtagctcagttggtaaagaatctgcctgcagtgtaggagacctgggttccattcctaggttggg

SEQ ID NO: 39044 - DNA, 201 bp, Bos taurus
tagataatttctgaattttaaaaagggggaggctaactatgtctcttgatctctcttcttagaaccttggggagacgacaccatattcttcagcggaggtragaggagggtgaagcccgtggtcccagggcctattgatattctcggcacacggtgaggtctgtgatttccctctaaaatatctgtccagtctttcttctt

SEQ ID NO: 39045 - DNA, 201 bp, Bos taurus
ttttccactgttcaatccctagcccctggaacagtgctgaggccctggtagatgttcaataaatattaacagagcagatgcatgggccatggggtagagcktggcaatttgttgttgttgttgttgtacaaataaacattgagactataatcagatttgaccactagtagcctatatttagggcttttcctggtggcccag

SEQ ID NO: 39046 - DNA, 201 bp, Bos taurus
caccacatctcacctacagcctcagtgtgtccctgctttggccaagtataaccatgtcctgtgaggaagggaaggaggtctcacccacggactcctgtggrtgaggggctctgtggtgtgatggcccccaagtccatgtctaattgattctagtcctccaggttctacttttttttttcccatctgatcatttaagagtgc

SEQ ID NO: 39047 - DNA, 201 bp, Bos taurus
gcctcacagagcctggccaattagtctccagagtttaaaacatcttagacaaaatctagagccagataaactggaagaaatgagatagaaatcacgattcyggatggccacagcccagctgatagaagcccacacccaatagcccagggaacgacatggttacaaccaaaaattattcacatttcgaaaagcaggcttttg

SEQ ID NO: 39048 - DNA, 201 bp, Bos taurus
agggcccttttccttcaggctgggaaaggcagagaccaagctctccctgccccaaactcctggaaaagccaagcacaaccctgcagtccggaccctggtgkggccctgccgtgggcaggggctgctactgctgtacagtgagctgcccactccatctctcacatcccaggaccctctccaggaatgtgttccaggacagag

SEQ ID NO: 39049 - DNA, 201 bp, Bos taurus
gctaaagtgtgccagtcgatgggcctgcccactttggataagttttctcctcagtctcctcgcagtcatctgccatctgcattggccctacactttcaaarcctgattcaagtttggagagaaaatatatgcatgaagtactggctttttaaaaggatgcccagtggcaagtggtgtggctcacttgccagaggccttgtc

SEQ ID NO: 39050 - DNA, 201 bp, Bos taurus
acactttcgtagtctactcataggataagatttttaaatgcaacatgaaaatttttaattaaaaaaaattttaaactgttaaaaaaatttacaggcccaarctctgtcactgcaaatacatttaggtttcaactgaaggtctttacatgctgacaggttaaatatgaaggccatgtttctcagttttcaaatgagtagtct

SEQ ID NO: 39051 - DNA, 201 bp, Bos taurus
cagatagcttttcctctgccctcctgaggaccacccatggctggcacagctctcctccctgcagacccgaggtctgggaaacatattcaccctgccacagraggaggcccgctgtgcttttgacttgcccctcccaccccagcccacagtttgctctctttctggcccataagcggcttccctgatagctcagctggtaaa

SEQ ID NO: 39052 - DNA, 201 bp, Bos taurus
gtctttaagtcattcaagaaaccaaatagttgttgcttctggggaggtcaactaaggatcagaaggagagacttactttcagtttatctcatttatcctayaattatactgtgatatagaatcatcgagggatgaccgtttcttttcttaccgtgccgttggcatatgacagttctttccatttaagaagcctggtttgga

SEQ ID NO: 39053 - DNA, 201 bp, Bos taurus
acctgggtcccccacgttgcaggaagattctttaccatctgagccatcagggaaatatttatctgagtaaatgtcagttccaattggcagtaccaaacagraagcagttagtagttcttcatccaagggagttaggggcaagatttattgagaagattcagcaagcaagtcaaagaaaggacttgactggctatagcttaa

SEQ ID NO: 39054 - DNA, 201 bp, Bos taurus
tccagagttgatgttattgtgaattcagcagcacttagggctcagctataacatgttctgtaatcagtgtatccataaataacttgtgcttatatataacmtcagaatgacttcttgtttcagagtgtggaggacattcttcatttggggaggtcaatacaatgaaactgagaacctctcaatcttatgtggcagccaaaa

SEQ ID NO: 39055 - DNA, 201 bp, Bos taurus
agatcacaggcagaagcagttgtggatctgagacaaacctggacttctgacttgaccacagatacagttgttcaaaccgttctgtggggcctggttgaacyggtggagctgcgggagaaaagataaactctatacacaatcctgtttgtttatttatttattttggccatgctgtgtggcaagtgagatcttagttcccca

SEQ ID NO: 39056 - DNA, 201 bp, Bos taurus
cttattctatgcactgagaaagtctcataaaaatttaaaggagtttgaaggtgcaagcagataaatggatactcataggaataaaggccaagaagaacctrcataacaggaattctccagtggtccagtggctaagactctgtgctcccagttcaggggcctgaggtccaatccctggtcagggaactagatcccacatgg

SEQ ID NO: 39057 - DNA, 201 bp, Bos taurus
tctgtggaacggagataataatagcccccaactcacaaagcaggggttggtaaactacggcccatgggccaaacctaggccaccttttgtttttataaatmaagttttattgaaacacagtatgcccatgcttttgacttacaacagcagagctgagtggtcaggatagggactgtgtgggactatgaggccccaaatatt

SEQ ID NO: 39058 - DNA, 201 bp, Bos taurus
ttcacagctagtgagaagataggaatctgaacactgcagggaaccctagagtctgagcattgttatttcttaaattaagctcttataaagatggaggtgamgaaagaaaaagaataaaataggctgtgctaatcttttgagttccggacctgggtcacactgcttttgtaaagctttagagaaaatgcattaagtgaacac

SEQ ID NO: 39059 - DNA, 201 bp, Bos taurus
gttagcttatctcatctggattcatctcttggtctaagagggactcagtaggtccaagaggagtgaggtttcagttgagaggccaaactagttcatctttrctagtttattacataaatcatcacagcttctcattgaccttcagtgatcttggccttggctttgcattgtcaaacctcatggattcttttccatacccct

SEQ ID NO: 39060 - DNA, 201 bp, Bos taurus
agaacatcatataaggtggaagctcagagtggggagtcatataaatggctcaaccgcacccctacctgttatgtggccactagcttgaaagaaagcaaaayactgagcatattctgaatgtccagccagaaaaagaggtggcattaggaagagccctgctgactagattatttaaggcctggactctctggtctgggcttt

SEQ ID NO: 39061 - DNA, 201 bp, Bos taurus
ctttcaaacaggaagactcaggacctacatgttcccaggggtctgagaaccactgaaaagcagggcttgtgatccaatggttcccaagatcaggcaaggamaccaggcttggttgggtcccttttattcctagaggtgtggcctgacaagtgggagccctgggttaaacaaatgaagatgttctggtcagggaagaacctg

SEQ ID NO: 39062 - DNA, 201 bp, Bos taurus
aaactgacacttgaagatacatctgtgtgtactttctttggttcaggaagggaaaataacaacatggggttgtttgtattgcagagaagaactcttcaagrtcagaactggcttcaatctgactgaagctcattggcctgtgatttctgagactgaacaggcacaaaaacacacagtctggattcattatgaagacactat

SEQ ID NO: 39063 - DNA, 201 bp, Bos taurus
ggataaaaccaaaatcgagcatggcctgagaaagtcctatgtttctaaaaccctccaggtctgattgtgtgacttttcatgacaaagatcaggataaccartcaaggccatgctacaggcaggggtgaggtgggggggagcattccacctcaattctttcacacgtttttaatttggaagaagaaagcctcagtcattttt

SEQ ID NO: 39064 - DNA, 201 bp, Bos taurus
ctgagaactcagggtcatccaaagacgccagggatttatgttggaggaggccatgttaccagcttcttttgagccagaaccactggaaggggaccatgttyggagcaaatgttcccacgtgactgccgctttccctgtgcatgaatataagtctgggctataaaggaggtagggacagtgggaagccaaaactggttcccc

SEQ ID NO: 39065 - DNA, 201 bp, Bos taurus
tggcactcaaagcagccacttaaagggaggaggcagaagggccactgccaccctccaggccattagcagagacatggagtgagacacggaaggcccacagsagaatcctgggagttcaggggtatgagctcataagctcacaaatccccagcaaagttttgacagatagcacattccacagctgagttcagtgtcctcaga

SEQ ID NO: 39066 - DNA, 201 bp, Bos taurus
aagattattactattaatgatcgcactttgtgatagactcgtcttttgtactgtcaataattaccctacagaatgagttaaactcaaatctttgaataaamtatgtttctgctactcttcctttagactttcagatcttggcattaaagacatttcttaactctagggtacatacatattttcaagactattttttctttc

SEQ ID NO: 39067 - DNA, 201 bp, Bos taurus
acacacacacacacacacacacacacacacacacacacgagaggccatgtaaggacacaagaagaaggaagccatctataaagcaggaggacagcccttascaggaaccaaacgggccagaacaatgagacatacgtttctgtcgtgtaagccccagtgcatagtattctgttacagcagcctgaatggactgagacaacc

SEQ ID NO: 39068 - DNA, 201 bp, Bos taurus
cacatgaactgtatgcaagctttttcctactcaaattctgccttgagaagtgctagtgaaggccagggattcatgccttctggatggccatcaggaaaggyaggttcagccagggtggcgactcatccaagatttcccaccagtaacaactgcaaagaagggccagccctcgtggaggtggagggcagtggggctggcccc

SEQ ID NO: 39069 - DNA, 201 bp, Bos taurus
atataagtacagataatacctggagagacccagatacaattcagaaagccattttggacttcaagatcagccagtttgaagggaaaaggtaatagtatgcrtgccagattatttgtgcttaggctaaacaaaacaaacatatttctgtgggaacttaaaacagaaaatctttcagagtttcatgttctgtaagtttgttga

SEQ ID NO: 39070 - DNA, 201 bp, Bos taurus
tcccaaagtgatttcttttagatacaacacaatttctttctgatcctgagcatatggtcctatgctaatatgaaatggtgtcttagaaaggttatttttgktttttttgcagggagcagtcatcctttgacctatattcaatatgtgacaccgatctgattgtgcaacaaccattaacctcatccggaaccccttgttgga

SEQ ID NO: 39071 - DNA, 201 bp, Bos taurus
tactatgaattataaaatattcactcctagaaaaaaatagaggagaaaactactctacatccaagcctccatcttcctcgaaagaaaaaggcttgtaaaawtttttctggacctaaaaattcctataaatgaatagtaggcccaagttatatgaggaggcacagggaattgattcatgcttaataaaccctgcaattaata

SEQ ID NO: 39072 - DNA, 201 bp, Bos taurus
ctctcacttctgggtgaggtgagaagccatgggcctctctagcagtatctcctacagtgggagaatccaggggctcattcacaaactctcactttttcccmgtgggagaaaccattggcccagaaggtcttggcactcagcttctcaccttgaagggggctgacatgaataaagtgaaattattcctcaatctcagatttg

SEQ ID NO: 39073 - DNA, 201 bp, Bos taurus
aggaataactcctgaaactatagagaactggcactcaattaaaaaaaaaaagcataaatgacaatggagttaataagaaattatatcactagctcaagatrtataaataaaaactgtatttatttataaattggacatttatcaaatggaatttttttgaaacaactaaaattgaacatgatgcaactggcaagggctaaa

SEQ ID NO: 39074 - DNA, 201 bp, Bos taurus
agcatccaagtattttttagcccatgtatgccacactaaattaatatttccattaaatgtaatgtaatatgtgaatcagagtgctagccacttagaaacayaaatgttgtagtaaacttatgcaatatgatatcaaaattgttttagtttactggattttcattcatatagtataaagtgatttctattagatcagtcatc

SEQ ID NO: 39075 - DNA, 201 bp, Bos taurus
cctgtgaattataatggtttcccaggtgaaagaaatcagtggtaaagaaccagcctcccaatgcaagagacaggtttgatccctgagttgtggaaaattcyctcagtaggaaatgacaggagaaggcaatggcaacccactcaagtactcttgcctggaaaatcccatggatggaggagcctggtgggctgctgtctatgg

SEQ ID NO: 39076 - DNA, 201 bp, Bos taurus
actagtcaacaaattcaaagcacatgttctaataatgccaggtgaacagtgttattttgggatacacatttgctcaaatatttcatataacaaggaaaatmagggtgcagaaaagattcattttctcacagaccagctatggaaagttaaacatgctattatacacagtatgagatataaataatgcatataaaatctgtc

SEQ ID NO: 39077 - DNA, 201 bp, Bos taurus
tgaatgtgattagtgcttttattaaagagactaacagaacggcccagccccatctgccccttgaggctattacttgaagtctgtgacccagaaaagagccmttgctgaccatgctggccctgattgcaacttcaaggctcaagaaatgtgagaaagaaatgtttactgtttataggccacccagtctgtggtattaatatt

SEQ ID NO: 39078 - DNA, 201 bp, Bos taurus
gtgtatgttaatatattttataataatgaatcaatctatttcagcaatatgatcaatgtgattgatttgtaacttctttgaaaatctatctttatatgtaytgataaaattttgcttataatttttgcaaatacatttaagctgtgagataaacttataattttgcaaaatttctgtagtcgttaagtatttagggcattc

SEQ ID NO: 39079 - DNA, 201 bp, Bos taurus
tggctctttattaagtagttagtcattcctgccaatatgatttttccatattgattcaatacagcagtcctttccataaagcctatatttcagaacttctratggacttggaagatcatagagagctgtattatatttactatatagattatatttcattattttgtataagtgattttaaacagttatgtatcttttaca

SEQ ID NO: 39080 - DNA, 201 bp, Bos taurus
aagtatgtaatttttatcatgttttttgatgattatttctgtttatattagctttataagcaaatttgcaagttgttctactaaatattctaaacaaatgmactcttgcaatgagaaaagatgataacggacatcaaagttctcaaaaaattgtatatgaaaagaaaatttttaaagtacgaaacagctatagttattaaa

SEQ ID NO: 39081 - DNA, 201 bp, Bos taurus
gaaacataatgcaaaattagtacaaaatatacaatgttatttaacatttactaaaattattgttatgtttaaaaacaattgcttagtaaatataaccaggygtaaagaacagtgttctggagaatttcaccttttgttttaccatcacacagtacttctataaaattgaatcatatatttgatacggaataaaagtaaatt

SEQ ID NO: 39082 - DNA, 201 bp, Bos taurus
agactgcaaaaatttaaagcatcaggcaaagttgtacataggaagaaaacatgtaacagctattgtttactaaatatgcttctttagatattgaatgtaaragggatagcaaaatataggtgaagtgtgagataggatggaaatagcaggcatgaaaagacatatttgcatttatgctttgctttctacaaacaaatatac

SEQ ID NO: 39083 - DNA, 201 bp, Bos taurus
ttgaaaactacagaattttttgctggcaaacaacagaacttgctcattttggcagaaaaagaacctacttgcctgcactgcctttttaagcttttgaaagmtgaaacatgtagactgtattaaaaagtataaagaagtaacattttaaatacttgctaactaactttcattgtgtcctcatgtgtgtccataggaggcaaa

SEQ ID NO: 39084 - DNA, 201 bp, Bos taurus
tgaacatagatgaaaaaatcctcaacaaaattctagcaaatagaatctgacaacattttgcaagaatcatacaccatgattgagtgtggtttattaaaggratgcaaggattcttcagtatacacaaaacaatcaatgtgatatattataccatattaacaaattgaatgatgaaaaccatatgatcatctcaatagatga

SEQ ID NO: 39085 - DNA, 201 bp, Bos taurus
aatatatgtgtacagagaaaattcttctataatttttctaatatttgaagacgttcaaacattctgaaatttacagtgaaagaaatttacaatgaacaccygccacctaccattaatattatactataatatcttagattgattcaacaatcaatttaacatatatctgctgattaatccagctcttttccatctatgctt

SEQ ID NO: 39086 - DNA, 201 bp, Bos taurus
ggtaatcaaggctcctctacaagcatttatttttagccataaacagaaacacttctttctaaatattgattgcacattaattaactgatcaccattactgyactgacatttaaaaatatacgttatgctttagatcctcttgctccttgttcatttttaattagttctataatctgtcaaaaaatagtgaagtgggacctg

SEQ ID NO: 39087 - DNA, 201 bp, Bos taurus
cctggtcttctggaaaatagcttttctaatgccttatttgtgttaaaaaaaaaaaaaaagactttttcatcatcctgacaatgttctagggctattatttyaatcctactgagactctgcaaacaagatcccaacatacccacataatatttgaaacaatggggctggtgcttatcaagtcaccatatatgttgttaccac

SEQ ID NO: 39088 - DNA, 201 bp, Bos taurus
ttctttaaatcactaggatgaatcaccagttggcattcattgcagttatataccagtgagagcagatggaatataaaatggtatgaaacatgtctactgargaaacaagcattttaaaagttaatgaaagacaaaacaacgtaagtataaagtaggctgggtgaatgttaacatagcaactatagcataaagagaacccct

SEQ ID NO: 39089 - DNA, 201 bp, Bos taurus
gaaacagagaaaccatgctttggttagaagcatggttagaagctttggttagaagcatatcagaagtgccttttccctgaaaggctgaaataatttgtacrtgaatataattaaatgtatctctttgggctggagtctgaagaatagtactctgctgactgtccccaattcttccactgttaggatcagttgaggatttgg

SEQ ID NO: 39090 - DNA, 201 bp, Bos taurus
aagtctcattcttcatttaaaaatgaagtcctttcaaagactaaatgttttaatgagtattttttcttcatggaatatcttttaaagtatgataaaaaatkatgcactaaaattatacccaaaggattgataatatcttgcttgattgattttgtatttttatatccataacatcttaaagctgttccaaatattaataat

SEQ ID NO: 39091 - DNA, 201 bp, Bos taurus
tattttctattccttttgcctgttagaaattgcagattatgttttatctaatgtctttaaggaattcattttaatatgttgcttcagatttcaatatgcarcaggaaatcgtccttcaaattgtcagtttatgtttctacttagcctatgtgcttatacataattgttggtaactttccttctatatttggttatacttgg

SEQ ID NO: 39092 - DNA, 201 bp, Bos taurus
ggcctcagcctgcaatagcttggagcagtgcttgggtttccagccagagactgggctgagccatggtggtgaaagcaccagatctagccattagaccagtkgtcagtcaagggcaatggccttttggctttgcagaaaataattcccacaaagacagaaagtagtgaaccaagtaaagtatttataaggagggaaaaactg

SEQ ID NO: 39093 - DNA, 201 bp, Bos taurus
ctttctttttcctcccaattacatggctaatgtgtacacagagatagagattaaaacttagatagaaatatggatcaggtcagagatagaaacttgcatayatacagtaccaaaaaccagaaaacatgtctcattttacttcccatattgtttatattaaatctctttgggatcattattcgataagtctactttaatgaa

SEQ ID NO: 39094 - DNA, 201 bp, Bos taurus
ggaagtctgccaaaaacagggcaataaaaaggaaagacaattatctaaagaaccatagcaacaatatgcacttgtgacaagagggaggaaaatgactggawgcttgtctcaaataaagagataacattgtaaattcaaggggagaagtggtaatatattgctttatatcttatatatatgcaccataaagtgaaaatagtg

SEQ ID NO: 39095 - DNA, 201 bp, Bos taurus
atgataactcaaagcttgaaatttgtggctctgcagaaaagctgtcttttagctaacttccctcttacttgtgtagtctttctttaatgagttcttcaaayacctatggacataatctactataattagagaaaaattttaacctgaaccaaaactgaatgactttggcactatatattattttgaatcattgaagttttg

SEQ ID NO: 39096 - DNA, 201 bp, Bos taurus
tagaattattggcttattagtagcaagcagctgaacttagatgtgttacatttttactttaaaaggaactactgactgaaagaaaacaaaagctacacatycttagggttgtgagttcacttttatttgaagacctactgaggactataacagaatttttgagagtggagttagtgcaaatatacgtctcagtagaaggct

SEQ ID NO: 39097 - DNA, 201 bp, Bos taurus
gaaggcctttaaattcactgttttgtcctaaattattttctatactaattttttaaatatgaattatccatgtgtcttcagaagtttgaaaattgtttagkatagttgagtaagaagaccgcatctttgaaagaaagatatatccatctccattttctattaactatcaggcacgctggtcttttggttctactagggcaa

SEQ ID NO: 39098 - DNA, 201 bp, Bos taurus
cttcatctgttggttctccgatcttttccagtggaaggcaaaacatgttgattattattaaagtcagtatgactttagcatcaatttacctgatgcctctyaaggcaatgcttcctatctctaggggagagggattatatatcaatcactggtttaaaatatataccatgtaatgtagactagtcatgacatgtgtaggat

SEQ ID NO: 39099 - DNA, 201 bp, Bos taurus
taagttaaataagtaaggttagtaactttactagagttccaggaaataaatcattgttttagctcctgaaagaaagtagcatacagtgaatgtgaccattyctatggagtaaaggtataagacaggctccttgtttccattgtcagagtccatctccattatttcatatgtcatgatgttcaataagagatgcaatcagag

SEQ ID NO: 39100 - DNA, 201 bp, Bos taurus
atgtatattcacatactcttcttaacagaaagatacttagacactcaccaagaaagaagttacaatttgtgttaaataactgcattgaacttgtgggccawattctttagactactactacgcttttccttctccattgatcctgatgtggattctcatgaatatcacaaataaaatctttgaaaatatgttgcttatttc

SEQ ID NO: 39101 - DNA, 201 bp, Bos taurus
aaattaaatgcaaattattttattactttctgaagttcattgtacttataacaaaatctattgttccatagctaaaggattctgttctgccattattagtkgagttcatatcaaaaggccttgtacaagatatttctggaggtaaaatatgttagatattattcctattatggaacaaccagacaagtaagcaggtatttc

SEQ ID NO: 39102 - DNA, 201 bp, Bos taurus
acagattttacactttctccattgtaatccattaaagatacagtaaggccttgaacaacctgggggttagaggcactgagccctgcaaagttgaaaatatrgttataactttagagtaggccctatgtatctgtggttctgcctctgtggatttaaccaaccctggatcatttggtactgtaatgcatatttatggaaaaa

SEQ ID NO: 39103 - DNA, 201 bp, Bos taurus
ctgagaatgacaaagggtggctgtcacccttgatggacagagtgtttgggtcctgcagcagccttggcagtaagactttttcaaaggctcttgttttggtrgaagcaatatcagtgagtgtttttaagttttcctaccaggatagcataatatataatgtgggtacttgggtttttggaaagctgtgagggtgtggtaggt

SEQ ID NO: 39104 - DNA, 201 bp, Bos taurus
caatgttggaaagaagaaaagaggcacacaagtttgtattctactgggctaaagatacttaaaaaatcaatgaacatactcagtagataatgttatatgtsaggagtttgtgagtgatagtgtatgtgtgtgtgtttaaagattaaaatgtgaaaaaagaagactatgttaaaggggatcagaactggcctggaaggcgaa

SEQ ID NO: 39105 - DNA, 201 bp, Bos taurus
ttgtttgtttttaaaagcacaacatagagatatgatatgagttttaaaaaatgtcctttatgaactaagctataccagtctaataacatcagttttctagmattagatagtctattttgaataatagtgagtatggattgttttttctctttactaagaataattctaaagtgtgtcatctgttcagtcatgtccaactat

SEQ ID NO: 39106 - DNA, 201 bp, Bos taurus
tatagtctgtgactagttcttagtctttccgtgattctgtgcctctggactgaacttcacaaatgtttctcaaggttttctcgctccttaggtgggccagratgtatttcctccttccctatgtaaggtggtactagtggtacagaacttgcctgctagttcaggagacataagagacatgggttcgatccttaggttgag

SEQ ID NO: 39107 - DNA, 201 bp, Bos taurus
gagtcatgacctgtctttcttaaataatgaaactgaaagttggagatatttaaaacattttgcaagatttatgagtggctaagccaaggccagacaactcmctgttgtcattgtgtacatagtttttcagtaaagtatatttctactttttttctcattatagctggatgaaggcctcactatgacacctctttactgttt

SEQ ID NO: 39108 - DNA, 201 bp, Bos taurus
ttacaacccatattatgatctaaccgagtttgtttagaaaaatctataatcattttataaatgccaatggttttagtttatcctttgcataggtatgttarttaaagatatgcttgtttttttcgttttgttttattttcatcaatgtgaaaaatgaactctgatacaagtacaaaattagaataagacagattacaaggc

SEQ ID NO: 39109 - DNA, 201 bp, Bos taurus
aaattgcttacatgtaagaacacaggtggtgggaggtggcctattagcagcacataatgaactagcttctgcacttcctgtttgattcccctccaagtccygaggtggctagaaaggaaaaaaaagtcattctctacctattaagaataaaatctaggaggtaatggttgagtgttcaggtcaaggaaagcatgcatgaat

SEQ ID NO: 39110 - DNA, 201 bp, Bos taurus
agttaatactgaaaaggtttgacaccaacatatagcaagttatgagtccagtttaagcagctgaatttatttttccaggagaaaatacttttgtttttttyctccacttggaattatcaagatgcaattttcaagatgcaagtggttaaaaaaagaagcaattggatgcatgaataaaagttagaagaatggacaatttgg

SEQ ID NO: 39111 - DNA, 201 bp, Bos taurus
gattcctgaataatattttgatcctgtgggaggcaaagtcacttacactcccagtgcaatgatgttctgtttttgttgtttctattccctctacttttcckttgttggttcctttatttattttgaaagttcaaaaatcctgacacctgaaaagttcatctttacttttggtccattgcatgaaagcagtaaagacacaga

SEQ ID NO: 39112 - DNA, 201 bp, Bos taurus
attatctccttcactcagtcattccagaagcattcagatgagagtcttctctttgtcagccactagcttaagggctggtaagaagagggcagaaaaagatrcaaaaattatccactgctttgaggctatcacatgggaaggcaaaccattacaacatagtaagaaaagcgtttaccgagttaagtacaaaatgcaaaggga

SEQ ID NO: 39113 - DNA, 201 bp, Bos taurus
ggatctcctgcactgcaggcagattactatatgagccaccagagagtcaggggatctaggtaaaaggcaaaattcagaaatcgtgcaggtagcatctagtsttcggcaagcctctgttggctgcagctggatcttgccactagcagtgagctcaggacctggcctcccagtcacaaggaggactggcaagatctaggaagg

SEQ ID NO: 39114 - DNA, 201 bp, Bos taurus
gcaggtaacttagcacctcccttccaggggtcttgccagcattaaattagttagcattaaattattaaattagtatgtgtaaactgcttggccagggcctratgtatgataaacactatgtgaatgttagaggttttgtttgtttttgtctacacagcatgtgggatcttagctccctgatcagggattgaacccaggccc

SEQ ID NO: 39115 - DNA, 201 bp, Bos taurus
tgtgtgcattctggtattaacattctggagtctccctctgtcacttcttaggggacagggtttgatgttttagtccagacagctttgaccattgggtcacrgggccccttgaaaggaagtacttaacttttcaacaatggtaacaagaatgatattcttagaaatctgctgatttaaaatgcttcgccttctcagtccagt

SEQ ID NO: 39116 - DNA, 201 bp, Bos taurus
aagagcccccttatgccatcactgttgggttcagtcagctgatgtcagaatggtgtccctcaaagagccagtagccaccagcatcgtcatggccatctccsgggtgcttgtagagatgcagatcatgggctccaccccagtccttcaaccagaatccctggaggtggggccagaacatctgagttttctccagctccccag

SEQ ID NO: 39117 - DNA, 201 bp, Bos taurus
tttgctctctggccctttccagaacacatttgtctcctctgctctagggcataacagcttccactgtttgtctgcattctgagtcgtgtgttcattctcaratctcttaatggccattgctgtcactactgtaatcgcataattttaattataaattataataaactgatgaagtaagagatcaaaaggagtattgttgtg

SEQ ID NO: 39118 - DNA, 201 bp, Bos taurus
taaaccactgatacttcattgccttcattatctagaattctttcaggaacagcagttacagtcacagcgtttagttgaacccagggcttctcccaagatcygtagtaactagtgtatgacagtaaacctaggctcatggatgcctatctggtttcgttaccatggatagacatattcaacaattcaattatgtgttgtagt

SEQ ID NO: 39119 - DNA, 201 bp, Bos taurus
taggtgcttaatgatatttgttgaagtggaaaaagcaggtgggagggtggcacagccactggaaattacagaaatacctgggcagccgtgagtcgtccctrttgccagagtcccctgcagtggccagctttcctctgtccttgaggatttttctttgcctttttctgcctccctagtgataccaatgaaagcctttttgtt

SEQ ID NO: 39120 - DNA, 201 bp, Bos taurus
attacttactactgcctaaatatttttcatcttagtctctacaactgatactttcaatttaattctatttgttgattgagtatctgctatgaagtagatgytatgtaaagctctgggggctacagtgattgcaaaatcttccaggattttggaggaatctggcaggtaatgatgactataatataaaaaatggtgtggtaa

SEQ ID NO: 39121 - DNA, 201 bp, Bos taurus
tttcctttgcccttttttctttagtttctcaacatgggcaagtccgtttgttgtgtgctggtttcagcacattggtaaccagtgttgtggcaggactactrtggttgcaagatgcccttaacgatgaactatcagggcactttgcaaaagaaaagtttattaattccaggtcctagaagttacacaggacacttaaggcca

SEQ ID NO: 39122 - DNA, 201 bp, Bos taurus
agtcaccagagattcaactttcccaggttatccatccttggtggggcactaattctgtacattcctaaatctaaccatttacatacttttctgaatcttcrgcctactggcataaattaataatctgctgtcagcaaaatcttatatttttaacctcttctctgcacaacctttgagctttttgtaccaactgaaatccat

SEQ ID NO: 39123 - DNA, 201 bp, Bos taurus
agctcttggtgcccatggaggttatggagaacagtttgtttgcttgtattgaatcttgtattgtccttcccttaggaggactcctgtgaggccttttgtgytgggctgagaccaatctgagagaaagactcagtgctgtgctcagaaccagcccttctacctgggccttttgtcctttcaccaaatctctgagccttcagt

SEQ ID NO: 39124 - DNA, 201 bp, Bos taurus
acaagtggtggtgcaaagacaagtggaatgtcatgtagcagagaaggacaaggatgttatggactcagaatgcgctttctgagcaaggatttcggcacagycctctttgatataaccccaccttagtgggacgctacttgggaatgttctctgtctctttctctgtctgttccctcccctaacccattttggtgatcagca

SEQ ID NO: 39125 - DNA, 201 bp, Bos taurus
cataggaatttcttgcaacttcttgatggacttgctgggcaacttcaaacaactcttgttaacaacttaatcagtagttcgtaagtataaaacagaaatamagcacgcaggttaagaacaggaatttttgccaggggtccccaacctccaggatctaatacctgctgatctgaggtggagctcatgtaacaataatagaaa

SEQ ID NO: 39126 - DNA, 201 bp, Bos taurus
gtctcccaacaattgccaggatctgtcttccacatcactcaagaacaaagaacggaagagcaatctttgtccttttccacatgctcaaacctcacacaatktctcgctaaagctggcttctctgaaggaataaaagttagcaagagtaatgaccaagcagacatttaactataaagttatcaataaagggagacaataaat

SEQ ID NO: 39127 - DNA, 201 bp, Bos taurus
gcggccctgcacacaacaggaacatgtagtgattacagccctggctcctacctgccttcccgcaaggtctctgcattaaacctacctgcatcccatcagtycaataagcctgagtttcccaggcctcccatggtcccccggacctctgtacatgtgagcccgatccatcttcccaaccgcccttattttggcccttgaatt

SEQ ID NO: 39128 - DNA, 201 bp, Bos taurus
tgaattagatgctcttatcaagccagcttttcttcacttaactagcccttaagctcagttcaatgtcgtgtgacagcacagttagtatgtggtggaaatgkccttgacttcagattttattcccagcttttcctactataccatagttcctctttagaaatggatccactgtttaattcctttagttattactttcagtaa

SEQ ID NO: 39129 - DNA, 201 bp, Bos taurus
ccatccaatcacaccagtccagtgatactctctcattcagatcaccctcttgccacagagcattgaacctaagtgtgatagggattcggcaaagaaagagrtaaaataggtgcaaaaaaccatcatgctggggagagacttgaactgaacccagtcatagggaggaacccaacccctaaggaggattgaccgccctagaaa

SEQ ID NO: 39130 - DNA, 201 bp, Bos taurus
taatccttctgccaaaactaccatccttgaacttacaggaggccttagacaccatcgtgatatccacacagcattgcttctgatccaggaactcacttcgmagcaaatgaagcatggccatgggcccgtgctcgtggaagtcactcaacttaccatgttctgcatcatcctgaagaggctagattgatagaatggtagaat

SEQ ID NO: 39131 - DNA, 201 bp, Bos taurus
gatcagaggccacatgtggatcccgggccccagcacactgctgaatgcattttgtggggctctgacaccggttctttccggaaacacccggaaaaccaccrgaggagggttattcgctgggcccagggctcgcaggggagacgccgcagaccctgacctcttccacggtctcgtcctgcggggtggccgcgctgtcgtccg

SEQ ID NO: 39132 - DNA, 201 bp, Bos taurus
tgtaaaatgactaatttctgcaaacccatgcttctgtgagtggttgattccttccctctcataaggtactagaacttgctgccttaaaagcaacagttccyaggataatgccgtattttttctacaggagctgtgcaggctcgattctgagttcctagaacaagtgaacaagttccaagcagaacaagtgaacccttccca

SEQ ID NO: 39133 - DNA, 201 bp, Bos taurus
caggctgcaagagaaggatacagtctaactcctattcactccttcatgtttttagatggaagcagtttttccccttcttccccttctacgggcctacatcrcaaatgaaatcaaacttgcttaaacatacgaatctaaaaaaggaacactatagaaaaaacatatgaaagcaaaaatgctttcatatcggccctcataatc

SEQ ID NO: 39134 - DNA, 201 bp, Bos taurus
ggcggccaacaggcagatgaaaaaatgctcaacgctgctcactattggagaaacgcaatcaaaactacaatgaggcagcagcacctcataccagtcagcayggccgtcatcagaaagtctaccaacaaatgctggagaggctgtggagcaaagggagccctcccacactgctgatgggaatgctggtgcagccactgtgga

SEQ ID NO: 39135 - DNA, 201 bp, Bos taurus
agaacacggcagcatcagtggcaggtgccctctaagatgccacatcaccagacagaaacaaaacgagaaaaaacgacgcattctatggggccatcaacccragctcactttccttcccgggttttgcccaccccttcttgtgcttctccaacgggcaccagcctgcgcccggccccctcttaccacccgctacggagagtc

SEQ ID NO: 39136 - DNA, 201 bp, Bos taurus
tcgtttaaagatggtaccagcagaaatcataggggatggtgagggagaatgcgtccccacctgtcactgagcccgacgaggatgaggacacagcaaacagygacggccacatattcacggctgggcccctctccatggagcttcaccagcagcttaggtaaaaaggcaagtctgggttaccaaatcctcagaactcatcgg

SEQ ID NO: 39137 - DNA, 201 bp, Bos taurus
gcatcagctgaatggatgtaccacagttcatctgttcacatctactcttgtaaatgccagcaagagcagcaaacagtgaaggaagggccttaactcttccyagcagtgggacagggacagagcaatataccaagtacttggaaggaaaagagaaggccatgcagtgggcaggaccttacagaaacccctcctaaagagaaa

SEQ ID NO: 39138 - DNA, 201 bp, Bos taurus
aaactctcacagctgtagtgctccctggagacccggccaccagactcagggaagtccaagtcacgcggagaggctcggggtcagtagcccagctgagccayggtcgcggtggcctgtgtgagtggacctcagaagacatccggcccagcgatgtcttctgggcaactcaactgtagaccccagctaacatggtatgaggct

SEQ ID NO: 39139 - DNA, 201 bp, Bos taurus
gaagtgtgaaacttccaatgtgtttttctgaaatccattcctttctttctggtccctttgcaaaaagaagaaagtccccagagagatgtttctgattcgaktttgcctctccaactcctttccaggcttcatgataggaaaagggctcattagctctggtggtatccacaatattggcaatttgagcaaaatgacctggtt

SEQ ID NO: 39140 - DNA, 201 bp, Bos taurus
cgtctcaataaaatcaatatgcttataaagtcatataagcatatatatggcatatttttttttcaaagaaggctgttttaattatgtatgtacactggccytttttcaaaaatattacttgatttattaatatagtatgcaggatttcctccttctgagtcagacaccactgcttcggaaactgcttgcaactaacgatgg

SEQ ID NO: 39141 - DNA, 201 bp, Bos taurus
atgtgtatgaagcactgacaattgttcttcagaagctgcattgtagattaggaattagaatctagggagtctgcggaggccatatgccaagaacttaagcrcccaaactaggtttttgaatatgttaccagtagatgtggagttagcacttaaacttgaagagtggtaaaaaactgaatcatgggccacctggagcttccc

SEQ ID NO: 39142 - DNA, 201 bp, Bos taurus
ctgctattaaatgtacagtgcacaacaaggagtacatttctgcaatgtgttctccaaaaagtagctttgaacatgccacatcaaaagcaaaatgagtttgrcggtcttaacacaacatctgctcagggatttccccctacacgaggaggggaaaaaaagagaaataaatgtatactacatggcatattgaaaaaaaaatca

SEQ ID NO: 39143 - DNA, 201 bp, Bos taurus
actagggaattctggagttatagagctgaggaaaatagaaatagaatccagtgtaactgaaaaggaccctatggggccttcccaggataagtaaaatagtrttagtcagtcatgaccaactcttggggaccccatgtactatccatggaattctcgggccagaatactggagtaggttaccattccctactccaagggatc

SEQ ID NO: 39144 - DNA, 201 bp, Bos taurus
tactgtacaaaacttttcatccatgaaggacaatcacagttcaactcatagcaaaagaaaaaacaaacaaataacaacaaaaaaagcattgatagcattgrtactgcatcacataaagaaacctagctgcattttgaaagaagagttatagtgaccatttagagtgagagaaaccaacacataactctgagcaacatttat

SEQ ID NO: 39145 - DNA, 201 bp, Bos taurus
atgtcaggaatcagcattagggactgaaaaatcaggattattagtagaatctaataataaaatatctgaactagagaactgagtgatattcaagtaggggrgatggccagagagatgaggtgggttcctcaccgttttatgaaaaaactgataggatctgacaagagccagtgagcagtattttaggtctacagcctctgc

SEQ ID NO: 39146 - DNA, 201 bp, Bos taurus
cttattcctagtagctgtattaacttgcacacaacaggtacacaagttttgagagagaacattttcatatttgctgtttggatgactatgcatttatttaytctatgtgacttaagaaaaagtaatatacatgtgcaagttggttttagaaaaggcagaggaaccagagatcaaattgccaacatttgctcgatcatcaaa

SEQ ID NO: 39147 - DNA, 201 bp, Bos taurus
accagtaacatacaaattatttgagctttcaaatgggtattttcatatccaagccattgctctttaccgtatagatattctgtgataccatatactcatartgccatgctatgatccaatatttctctaacattctcctatttaatttgtatattctatttagagaaaagtcatattagtctcagcttctgctacagagta

SEQ ID NO: 39148 - DNA, 201 bp, Bos taurus
acatctgatggttgtagtttatctttcttttgtcaattgctttacaatatacttaatgatgtcttctcttaaaaaatgttgttaggccaatctgggctgayaaaatacaagatacgttcaatagctttctgtgtccacacaagacaagtcatgcataagacagaactctccaaggaaatttagggtgtttagaaaccagaa

SEQ ID NO: 39149 - DNA, 201 bp, Bos taurus
aactaaaaaaaatgtgtttgtagtattttaatttcacacgtgagaaattgttctgtagctagtaggttatatatgtagtatggccaacatatttgtcttgraagcaacagttataacgggacatggaacaaaagttcagttcacttcagttgctcagtcgtgtccaactctgtgactccatgaaccgcagcacaccaggcc

SEQ ID NO: 39150 - DNA, 201 bp, Bos taurus
cccacagattgaacccaggtctcctaagtctcctgtattggcaagtgaatacttaacccctagggccacctgagaggcccaggatgcacacacttggacckaagtcactaggctgtgaagaagcgcaagcagccaagaagatgctcacgtggagagatccacaaggaaagacactgcacccttcagtctccagccatgact

SEQ ID NO: 39151 - DNA, 201 bp, Bos taurus
gtcacttataattttatttaaatattttgcttcatatggcctaacttgtctaatatttcaaatgtgtgctgtgctaagtcgcttcatgtcctactcttggygacccagtggaccataggccacaagactgctctgtccacgagattctctacgaagaatactggagtgagttgtcacgcccttctccaggagatcttccca

SEQ ID NO: 39152 - DNA, 201 bp, Bos taurus
tctaacaaaacctgttagatatgttcttcctctactacttttgtaatattgctttattatgaagatttgcatttaaaatagaatttttctactttacaatrtgccagtcctttacatatcaaaatatataatagttaggctaaaagagaagcaaattatatcccctagcaccattacttaaaaagattccaatcttaattt

SEQ ID NO: 39153 - DNA, 201 bp, Bos taurus
ataaaattgaaaactaccaacctataaaagttgttaatatagtaaatgtaactgtagttttgagagccatcttcacatttaaattagaaaggatctttccrgggcaggggcgggaaaggggtggcggatattcctatctgtcttaagatttaaaattctgttggcatcaagcacagattctgagctcatgatttctctctg

SEQ ID NO: 39154 - DNA, 201 bp, Bos taurus
cattccactgaggggggcccgttgccccatgggggtccagggtgtgaccccagttcaaagggtgcctcctttggatggagatctggtggtgtgtgatgctyaagaaggaaacggccttgaattcattgcatccaggtccacacacacagagtaaccctggacctgtgctacttcccagctcctggatcactgctcttgaaa

SEQ ID NO: 39155 - DNA, 201 bp, Bos taurus
ggcgaagagtcagacatgactgaagtgacttagtacgcatgcatgcaatgcttgtgcagagtagcatttgccagacagatgggaaatgggccagcttagcmgtggaagaagcaacactgccaggcgtgagtaggaatcgcaaacagtacagcagggggaggagacaggggccactatctggggacttttctggagcaaaat

SEQ ID NO: 39156 - DNA, 201 bp, Bos taurus
aagtgaaaacccttggccaaccaacgtccaacatgttcaaagctaaaacaatatagatttttccagagaggtgctggtggtatctatattagcgaaggagrtgctaggaactggtccctggcccccaatacctctttatacaaagtacctacttgaccaaaggagtcagcttttcttcgttggctttatagattacaaggg

SEQ ID NO: 39157 - DNA, 201 bp, Bos taurus
caggggaaggggtagaggggacagactggggtgggcaagtggctgagggggactagtcaggatgtggttggcggggaagaacccaagaggcccctgcaacragaagggtcttttgggagccgattgaaaactattgagaggaaaggtcatttcaaagaggtttcttgacttttgtaggccacggggacccccgagagggta

SEQ ID NO: 39158 - DNA, 201 bp, Bos taurus
ctggctaggtgacatgacagcaggtgttagcacagctcttaaagaagacttccagtcttatataggtgatcaaaatctattttataatggacagtcaatcratacttctttctctattaactcaatagaagtttgaggaaagtacccagataaaggcggtataccctggctttgagatagttctttttcctctgtattgat

SEQ ID NO: 39159 - DNA, 201 bp, Bos taurus
atccaggaaaccagctcaacggcaacttgttggtgcagttgccctgccatcggtgagcccaccgtgagccctgtctggccaggcagtagtggcattcctckctgtagtcctgacacacatcaccatccccagcagtctcacatgtgggccagcagcagttcagtctctccagcctttgctcttcgttacatgggtattctt

SEQ ID NO: 39160 - DNA, 201 bp, Bos taurus
attcacagctgactcatgactggacgtggttggccacataattatgaagtctgggttcctaaatgataaattagatgcagtgccttcgttttgtgtaagtsctacttagagccacatggcctgaaatagagcccctttgaaatgaatcacactgtacaccagagactggaaaaatagattacattgaaaatgaatccaaaa

SEQ ID NO: 39161 - DNA, 201 bp, Bos taurus
aatgtctccctctagccctgcgatggttctgagaggtctagggggtgagggtgggcatggagggcccaaacacccggcctccggcagccatgggctttcgrttcatttcactgatgcccacacagtgcccaccgatgacacacatccagggcctcacgtggccctgcccaccaggcacctgggacattgctgtatctcttc

SEQ ID NO: 39162 - DNA, 201 bp, Bos taurus
atttccttagggcttccagaataaagtgctacagacccaggattgtctcacagtcctgggggtcgagacatttgagatcaaggtgttagcaggcccgtgcyctctcggaaagcagtaggggaggatctgtttcagtccccctcctggttcctgggctgaggcaggagaactctagtgttcacacggctgtctcactgtgtg

SEQ ID NO: 39163 - DNA, 201 bp, Bos taurus
aaaaaagagtgaacgtgagaaaccctggcccttgccctgccaatgaagcacaaccccaggtggtcatctctctctctccccacctgcaccccgccccccaycatgtgggcccaggcacaccctgtgcccaacaggtcctggaagtaataaaacttgctttttcaaagtttcctgacagtggttgctgaggtatgtcttgca

SEQ ID NO: 39164 - DNA, 201 bp, Bos taurus
aaccccttggggaggctcacaggggtcaaaaggtagaccgtgaacagctgccgggtcattctagaagccagctctcctgacgtatctaaaggccctcttcyctgagccccactttcttctactaaaaaatgatagggaccaccaagctccaaaatccatcccggcttcaagaccccctgataatgcttctcctaggtttct

SEQ ID NO: 39165 - DNA, 201 bp, Bos taurus
tatctatgtataaattatactagataattattgttgtatctacaaaaattatactatcatatgagtctataaattatatttgtgatgtgtaaatggtttgrcacttcaatgagctgacttagaaaaagaaaatatcagaggcgggggagggttgttcgtagcgaagctgccacctgcccaccccatccacaggacgctgtt

SEQ ID NO: 39166 - DNA, 201 bp, Bos taurus
tcttccaaattaagacattcccatcctcaaagttcattcccctaattaatgtgtttgctgctaggaattaactgatcctttgtttctctctcagaaaaaakggtttcagcaaacctcatttcctgccaggacccctgcttcaggtgctttgaagccagaatgagtctaaagcagtgatgggaactgaaggaagcagacatt

SEQ ID NO: 39167 - DNA, 201 bp, Bos taurus
ctacaagaagagacacagaaatgcccaacagaagtagagctggcagtaacagcagtcagtgctgctcaggaaagaaaatatctgtatacctagggccttcytatgccagatgactatctaaaactcctttcatatactccatataaattccattcaaatattccattcttatatttcatataaggttaaaacaaaacaaaa

SEQ ID NO: 39168 - DNA, 201 bp, Bos taurus
gcccagggacattgtcagtcctgtctgtggaaggatcgcctggtgtcctgccggacttcctaatgtcccaagggacttttcctatggctgaaaataccctmtgttttcctcaggccatgggtgtgatctagccctggataatgctgacctgggatgccttttgtagctaccgttttcttaataaccttctgtacaggtctc

SEQ ID NO: 39169 - DNA, 201 bp, Bos taurus
ctatgatgtcgatagtgtggggcaatcagtacaaggctgagaacttaacttatatgttaaataaacatacctaataataaacatattccatagatttaatkagcaatgcattattgcacctgctttgagcccttcacatgctttcaaattaaagattgcattcctgggaagtgaagtgagaaacgtacagcttgggattat

SEQ ID NO: 39170 - DNA, 201 bp, Bos taurus
gctctgatttccatcctgctctccctcacctccatctgcttgggaggcctgttgcccatctgagaactgggaacatctttattgtgcagcagaggctcacygtggtggggggctgtgtggggccatctcacagcctgagtgaccatctctgagccagcggtgtaggcatggctgagccaatggaaatcggctaggggtctc

SEQ ID NO: 39171 - DNA, 201 bp, Bos taurus
agtattcttgcctggagaatcccatggacagaggagcctggagggctacagtccatagcatcccaaggagttaggcaggactgaagggacttagcactcaygcagcctgtgtactagataatactatcccctcttctttacagatgaggaaagggtcacagggagatgaatcaaccctccccctcaagccacatagcaggc

SEQ ID NO: 39172 - DNA, 201 bp, Bos taurus
tccttttacatcattatttctggaagaaacaagagagaattagttttcctatcaaaatttcttacaaaaatgacaaaaatactaccaattgtgttgttttyctttcttaactgatatatagttacagggtataatttccagaacactgagagaattctgggtacttccaagtatttgagatatgtgtgtggaactaagaga

SEQ ID NO: 39173 - DNA, 201 bp, Bos taurus
cacaaagagttgggcacaactgagcgactttccctccctccctcacagagggggacagtggctcatttggggagcatgtcattaaactgcctgaagcgtgyaaaggccattgccgagagatgatgtcatagctgaaattcttgtttatcttgaacttaaaaactcaacaagaataatctcctgttatttgcctatcatatg

SEQ ID NO: 39174 - DNA, 201 bp, Bos taurus
ctgttagtgatcatcttactttattggaatgtgggcctttctgatgtgaatcacacttggggttacagaagaagcagacacacagcggcagagagggcttyctgtgcaaagtgtggtcccaaggccaagagcttgggggatatacagcaaatgaagagagggcgctggtgaagtatcctcacaccacctgtgtttgtccaa

SEQ ID NO: 39175 - DNA, 201 bp, Bos taurus
gaaaagcaaatgtttggtaaacaagagtttgctgggcctgcagagactgatggacacagagtgggctctggtctctgggccctgctgagttttccccactrcagtctgcccttattcagtgcagacatctctggaaatagctctattccaggaacaggccatctatctaaattttgtaagcgtttaggggaaggtcacagt

SEQ ID NO: 39176 - DNA, 201 bp, Bos taurus
taagattttttaagcacaatatcttctacaatttattgactataacacagtttgttcaaaaaatgaaaatagattgttttttttttaaatattagattaartgctttggccatgctgtgcatatttgtttgcacagagaaaaaaggaccgttcttttcatgtaatcttagtatatttgggaaaatggaaaccgatccttat

SEQ ID NO: 39177 - DNA, 201 bp, Bos taurus
gggcacttgcctgacccagcgagtctgcctgcaggtgctgcctttggcttgagtggagtggggaggctggcctgttcccaggttcactgagcctcttcccrctccagaatccggtgtctcctgctagcgtttatcaggtcgggtgatgatgcttcatgagacatctgctcattgactccctggcagatgcggagccccggt

SEQ ID NO: 39178 - DNA, 201 bp, Bos taurus
attggtagtctctagctaaatatctgaaaatagcccaaaagaaatcctacagctggaaccaaaactggaaagtcacaagagaggaaatcatacaacatcarcagatgatttgaaagtcttgatgccaaaagcatgtgttatgctaggttataaactgcaaaccaaaaaagagatgatagtatataaaaagaacatagaaga

SEQ ID NO: 39179 - DNA, 201 bp, Bos taurus
gcagctggaggaagacagagctctggctccatctcagtccccaagctgtatccctctggccatggtagcacttccccaaacaccacagaaaggagagagcyggatccttccagccctcagaaggactcagcctcttctgggctgccttcccaacaccccaaacaccagccacttcctttcaaacatatttccaagtgaatg

SEQ ID NO: 39180 - DNA, 201 bp, Bos taurus
tctcctacattgtgaacagattctttatcatctgagccaccagcgaagtccaatgtatctgaacttagatgcagcatttaacctctggcttcaggtggcckctccccctgcaaacccagtacttagagtggaaaggagctttgtcctgaccagcccttgctcatgcccctgaactctgcagaggccctcctcagggagaag

SEQ ID NO: 39181 - DNA, 201 bp, Bos taurus
tgatctagagtgggtgaattctcttgggcactcctcccacttgaactgaaacctttatctaccatcagatagttgtgtgtcatcagtttttctgtagttgkagaaaatccgggaggaaagaacgactgcccagcagggaccgaagttgtgaaggactcagcaaatgtactttgacagaatatctgaccgatatctcagaca

SEQ ID NO: 39182 - DNA, 201 bp, Bos taurus
tgtttagcctctgcccataaaataggaatttccatctccttgaaaacacaggaagtaaccgccagctcttccctcaacatgtgtacctggccccccacccygtaagaagtgagagatgtacccaatgggtgaggtgggcagagtccgtcatctgccatcatattctcttccaggtggggccagtgcagacaagggagactc

SEQ ID NO: 39183 - DNA, 201 bp, Bos taurus
tggcgtgactctctgcatggaacatttcatattcccatgcaatgaagaagccttcgaagtgctagtgggaagctgctgtataacacagggagctcagctcrgtgtcttgtaatggcctagaggggtgaagaatcagcctgcaatgtgggagacccagattcgatccctgggtggggaagatcccctgaaggaagaaatggc

SEQ ID NO: 39184 - DNA, 201 bp, Bos taurus
ccctctgctgggtgcctctagaggcgtggattccatctgcatcggatgcaaagacagaacaggagaacaggcaactccaactccctgggagtgaacacagycccaggggccagcgcctccctaggtacagacagaccaaggcctctggctgctgcgtggttgtgggagagggagggaaggttgaggaggaagctgggccaa

SEQ ID NO: 39185 - DNA, 201 bp, Bos taurus
cacaccatccccgggccatgacagtagctcatggaggggcctgagagtaaacaaacttgtcaaaggcatgacattagcctattgttaccaagggtccaccrtgtggagagggcctgactgagagagaaatcaacaaatgcaaaagaaatcagagtatgagagagaaagatagagtgagttcatgacattatttgaacccct

SEQ ID NO: 39186 - DNA, 201 bp, Bos taurus
tccagcccctcacttgtccagtgttccagacacagagcccagcctctctccctgccatctgtgcttccctccctattcccagataggggtaggcagggagyagggcaagtggtcaggacttcagcctctcctcttgtaccttcctcattcctgctcaggtctgtggctctctgcatccctgccctaacctctgcatttccc

SEQ ID NO: 39187 - DNA, 201 bp, Bos taurus
ggcagggatgagacattgctccctctctggaactccctcctgagagcacagtgacagatggagggacctcagggatcttccaggccaacctcttaaatctraagtgctggacggggacacccagaactgaaagtggagcagaaagacctcctgggtaccagggcattggagggcctgtccctcatcactgatagtgagctg

SEQ ID NO: 39188 - DNA, 201 bp, Bos taurus
ggagagcgtgacacccaagtcccacctgtttgggggatgccacagctatttgtcttctgtcctggaaacaagcctcccttaggaacatcccagaaacattyagcggctcaccctccccagagcccctgtccggttaagaagcttgagcccactgggtggctgaacgctcctctgttgcagtcccacagccctcagttgccc

SEQ ID NO: 39189 - DNA, 201 bp, Bos taurus
aagtttgtctccgttgcttctgatccactgaacctctccaggccagccctgatcacgtagtttcagtttcccagacgcttactgagtgcctgctggggacrggaaggggttccctggggcctgtcacaaatgagtccctcgggacagactcatgggtgcagcagggaagcttgtgccccgggtgctgggagccccttgggt

SEQ ID NO: 39190 - DNA, 201 bp, Bos taurus
ccccgccaggcacagaagccaccagcagtgccaggcagcgtccgcgggctgaacctggaggtgctgggtgcagcagaaagccagctcccagggactctgcyggccccttgcccagcaaatgcgtggccatcgactgcgagatggtgggcacaggaccccgagggcgcgtgagtgagctggcccgctgctccgtggtgagct

SEQ ID NO: 39191 - DNA, 201 bp, Bos taurus
ttcctgactctcggccccttcctccacttccacagccagcggcagactgtcaagttctcaagtcagatctctctgaccttcacataaaaggaccttgggaytgattatgctgggcccctctgaatcatcccaaaactctccctacctttatttttggttgctctgggtctttgttgctgcatgtgggctttctcttagtac

SEQ ID NO: 39192 - DNA, 201 bp, Bos taurus
gtgagttatgtccatctgccagatctgacttggcttcaggccacggggattaactcccaaggcttctgttggagatgtggttatcacaaccatctggcatktaggataaggccatacaatctgtttagcttaagcccaagggatatgaaacttggtttttaaatattttaattacaatgtgacagatcatgaagggctgat

SEQ ID NO: 39193 - DNA, 201 bp, Bos taurus
tgttttaagacttctgcccgctggaaataattaacctcttgagattttttttttttaattgaagggagggcacactgtacacccgccttccactcagatamttgaggcccaatgcctagttaccccggagaaggcaatggcaccccactccagtactcttgcttggaaaatcccatggacggaggagcctggtaggctgca

SEQ ID NO: 39194 - DNA, 201 bp, Bos taurus
agagaccttggcagctgcaaagggcaacctctctcccattctctgccatagcctggagttccacagtcgagccacacggtcgggttgaagaaggaattcayagggcctggactccatcttaggcctgttcatgctgatcatgctcagccacctttccaatggactctgaactctgtgtttagtgcccatgaaaacaacaac

SEQ ID NO: 39195 - DNA, 201 bp, Bos taurus
gacgggctacaacccatagggtctcaaagagtcagacacgacttggcaagtgagtgcacacacactctgtcagaagttagggggctcctttctatggccayagcacctcacctgacccaccagcctctccctttcactgtctccctcctgcatggcaacgagtcaggacaatcagttatcttacatgtaacaaaagccctg

SEQ ID NO: 39196 - DNA, 201 bp, Bos taurus
tccgcacgaagcgagcctggaacggcgtctcaaatatgttcttcttgtgggaattattgtccatgttaccagggaaaatctggtggaagaggaggtgtcargaggccctcagacccagccctcctccccctcagaccccagatctgactcgcagggcacccctggagtggggaaggcaggatagctggacacacactcacc

SEQ ID NO: 39197 - DNA, 201 bp, Bos taurus
gtctaagctatttgtctttctagaatttagattctagagtctatttgtctttttagaatctagaacattgattaatgccctggggactagacagcttgtgkgatgacccttggctgggaaagctttggtctaccaagtccagaccccatcaaggtctcaccagcaaggtaacttgcagaaaagcctcttcattttcccact

SEQ ID NO: 39198 - DNA, 201 bp, Bos taurus
ggttccctgggctgtttccagggcaggacggagagttacaggctgaggaagtatggccattggctttcccactgatagaaatccatcgtctcctacaaggrccgatgagtgtgtcaggcaagtgtctactcctcagttctgtctcgtcacaacaaagatgtggagtgacggacattaaagccctcggcgtgtcacagctct

SEQ ID NO: 39199 - DNA, 201 bp, Bos taurus
ctaaacacattgcccagactttacacagaggcagcactgggtatgacaataaagtgacagtgttggagtccttagagcctgagctatctcaggccttgagsggaatctcatggacacccaggttgcagccacagctttcacctttccctcagaggggttatgctgatgaggtctagtctcaaaaatcttaactcatggtgg

SEQ ID NO: 39200 - DNA, 201 bp, Bos taurus
gggtcacaaagagttggacatgacttagcgactgaacaacttttctctaagttgtcaccaaaaggtggacagattagaatgacctgaccaccatgtgatayggcccttgccttctcctatactactcacagggccttctggaggaagcaagcctgccccaggcttactgtgctggcgtggggttttatttcaaggcgttga

SEQ ID NO: 39201 - DNA, 201 bp, Bos taurus
agtttgttttccctgttttttaacgcgcagaatcgtcaattaacagccttgtttcattttgctgcaacagcgccatctgctgttggccaagcccatgactygcacaattgaggatcccaggtatgggtttaagctaggaagctaaccaacatctgtgaggtgctctatgcactttgcagacgtggtccacaccacttctct

SEQ ID NO: 39202 - DNA, 201 bp, Bos taurus
tgagtttgcccaaacttagaatggttcagaggaaccacagtcaccccaggaagccctttttcacagcattctgggtccagggcagttgaggagaggcctarggatgctaactacaggtcagatggcaggagatgttctcagaaggctgtgttctcagtttggtcccgaggaccaaagagctgctcagcaacggccttgcca

SEQ ID NO: 39203 - DNA, 201 bp, Bos taurus
tcgctcacaaaatacagcatgtgattattcttacgtcagcacctctgtaaaagctgcaccagcgttatgagcacctccggggcgtctgtccctgaaataayaaggccttcactaccaggcttcagaaggcagaaggcaaccatctctcttgagctgtttctaccaaaaacacatggtaaagggagtcgagtgctcatttgg

SEQ ID NO: 39204 - DNA, 201 bp, Bos taurus
tcggcctagataaatccccaaaacagaactctgcggaaccagatttgagggagcagtgcaaatactcccgcgggaagggagtgcagaggccaggcgaaacytgttatttgacctcaaaactaggcttagtagacccttgcgtgttaattctacctcggaggtactggtggcccctgaaaatttcacgctgcagttaccatg

SEQ ID NO: 39205 - DNA, 201 bp, Bos taurus
catgcaaactcttagctgtggcctgtgggatctagttccctgaccaaggatcaaacctaggctccctgctctggaagtgtgtagtcttacccactgtaccrtagggaaggccccatgtacatgtatttttaaccaaagctaatgtccttctcagctcctttttaaagttttacttactaagaaagttttaatttgctaaga

SEQ ID NO: 39206 - DNA, 201 bp, Bos taurus
caggcctcagctcccctccactctcttgggaccattcagaaacagaaacacaggtagccagatatgccaactaccacccttcataagaactgaaactcaarcagaatatcttgtccttttgggcccaaacagcccctccttcctcactgaaaccacacaaaacgtgtgtcctttattcttcctccagtttttgagacagaa

SEQ ID NO: 39207 - DNA, 201 bp, Bos taurus
agagccactcatcctgcctacccagagaagttccccgcattctagttctattccatcgggagacaggacctcttcagagggccttccagcccactcaggamccccagcttgagtcctgaaccactgacctcaccccatcctgctctcagccctcccagtcctggccccaaacacaccccttggtttagggcctggtctgtc

SEQ ID NO: 39208 - DNA, 201 bp, Bos taurus
actgggtggagacttgtgaaacaatagatcttgaattggacaggttgtggggaggataataataaccataggtcttgggccaggcttgtgtaagtgctctrtgtgtattgtctccctaagagtcctcacaggtgctagttgttgcttgcaggctgagttgctcagtcgtgtctgactcttggccaccccatggaccgtagc

SEQ ID NO: 39209 - DNA, 201 bp, Bos taurus
ctcccatggccccagacatgctgtgggcttgcagatgggagcatcttattagccaggctactgcctgcgtagatgcagccaagggtcgggtgcaaagcatytgccctgcatcaaccggccccattcagcccacctgggttctgcttcgtcccatctgaagctgagtgtgctggtgagggagaacactttctatttaaagga

SEQ ID NO: 39210 - DNA, 201 bp, Bos taurus
cagtttatggggtcacaaagagtccaacatgactgactgagcacacacctagctacagatagaagcatggacgtcactgactaaagatgttttgacaccaytgatacggcattcccaggcctgggcaatgctagaactgtgggtaggtgttgctggccacgtgccaggtggaattctgtgtccagtgctggacgacccttt

SEQ ID NO: 39211 - DNA, 201 bp, Bos taurus
tcgtggagacctggaactttgcacgtcagtcctggggagttattcctgccgtagcgtccacgatgaggctccttcttcacctaccctattgatcactactkcgctacccgaagcactattatttattctccctctgcctgtaccctactactgtcagcacagtaaatggttcttggaagcttacaggtgtggatttggtct

SEQ ID NO: 39212 - DNA, 201 bp, Bos taurus
ggcccacagcagtgcctggggactgaagtaggaaccctcgcggcacaagaaagacatgcagattttgttcctggcacctgagagcaaagaaaacagttccygcagaaacagcactgcggcctgggagtctatctgaaaccatcaccgaggctccactgtaagctccaatttccaggtcagaccccagcagcagaaaaggtg

SEQ ID NO: 39213 - DNA, 201 bp, Bos taurus
caactctgaggaacagcccagcaaggaatgaccagagctttgtatatgtggcataactggccagaatgttgaagaatgttcagggcccatagatcaaaatyatagaaggcgatcttgatgtaggtcatttatgggtcaaaccttaagaaatgctgccattaagaatgaaatcacagggacttcactggtggtccagtggct

SEQ ID NO: 39214 - DNA, 201 bp, Bos taurus
atttatttatgtaggccgtgcccggtcttagttatgacatgtgggccctagttccttgatcaggaactgaacctggggcccttgcattgggagaaaggagytttagtcactggaccacgagggcaagcccttgggttaccgaaaggtgtggggtctggctgctcgctgccccaaagccggtaaacaggccaggttggtgga

SEQ ID NO: 39215 - DNA, 201 bp, Bos taurus
cctgtgatggtgggggtagaggcttcacctgagtaaggcgggccaggtgggctgggccatttgggctcctcacgtggccaaagcatcccagtgttctgttkactgagcaccaactgcatgctaggcaaagtgcgaggtgtttagtatcccgattttacagatgaggaaattgagactcggagaataagtgaggtgtccaag

SEQ ID NO: 39216 - DNA, 201 bp, Bos taurus
agtgcaaggccgcactctgagccatcacaccggcctgcttccctagagaatggtgcaagtcagagaggggcttcttggccagccagggctctggggtgaaracacatggaacagaacaacccccaagctgacttaacagttagtgagataaaaatatacatttttaaaaattgtgaatggcctgtataagaggaaaagttc

SEQ ID NO: 39217 - DNA, 201 bp, Bos taurus
cctgccccggcggcgagcagcgaggccagcagagaggcttggaggcggtagacgaatcctgcccttagaggcacacagtggcaccggaaggggagcccgayggcctccaggacactaggagtgtggcttcttcatctggtgctggttgtgcacggtgttcagtttgtgaaaattcacctactagtgcatttatggtatatg

SEQ ID NO: 39218 - DNA, 201 bp, Bos taurus
cctgtctgacttgtgtggctaggaatggttgtgtttggcctgcgggcctagggaccatcatgcccagggccagcaggcctggctctccctcccaggggccygcagtgactgctgtgtgttcatgcagcagtctgcaggcacagtgctttctcgtggtcattgtcagagatgtagggtggtcttgttttgcgggtaaggaag

SEQ ID NO: 39219 - DNA, 201 bp, Bos taurus
gtttaatggctattattattttgtctggctgaaatgttttcttttgtttctgcattttctcacttctctgattttttttaacttggggaaggcctaggcgrctagagtttttctaaaaacaagaggcaggtggagtacatggtggggagcgggtgtctgtcctccttatggggaaaggcccataaggccttataacagtgg

SEQ ID NO: 39220 - DNA, 201 bp, Bos taurus
gtggaggctggggctgtggagctaaggaattcagccatgggttgggaggaggaaggtgcataagactgggtggtggccatcgccatgctggggtccttctmcatgtctcacctgatgtgtggagcagctggaggtgcaggagctgacctagaactggccgagcagctccaggaaaggtccggcagggccgaggcggcctgg

SEQ ID NO: 39221 - DNA, 201 bp, Bos taurus
aaattcagaaaatcatccatgttattatattcactgtgctgtagctataagtaggtaaaagctactagtctgcatgacaaggcttggaagtatagaaaacraaaagtctgatttgttgtgatagcagaaggaacacaaggtagaagcacaaacactggagtcagacagacttggcctgtgtctcagccctgccactgactg

SEQ ID NO: 39222 - DNA, 201 bp, Bos taurus
agttggccctttttaatctattgctcttatttgataattctagttatatattccattataattttttgcaaaaggctatggttaaatcgatcaacttcacrttaaatcttttcctttttttgtctcattttgggagtattaattttactttttatttttaatcaattgttattggcatatagtttctttacaatgtttttt

SEQ ID NO: 39223 - DNA, 201 bp, Bos taurus
aatggctcagtgattcagccatatcaagaatattcaaaggtgtcagagagggtttggggaagaccttttccgccccctcccctgtggagacaccgtgaatmctccttgacttctgatctgaagcttagtgatagaggaatctctgggcttcctgtgtctgggttggcggtaaggataatgtatggggaacgaattacagac

SEQ ID NO: 39224 - DNA, 201 bp, Bos taurus
actctcttatgggaaaaacggatctacagcgagtatctctatctgtgtctatgtctacacaacactgcacagaaaagatgcacatcagacagtacaggagmtcactcacctgctaagacatccaggtgagtggatcctcagtgtggatgcttatacattcactaccaaagtctcagcgaatgtgacggaaatgaatacttt

SEQ ID NO: 39225 - DNA, 201 bp, Bos taurus
tcatgttgctccttgccaggcctcagctaacctccagtccttgagggagtgaaaaacgggggtaaacactgcctgggaactttccagagctgaagatgatrccagaaaattcccaagcagggcctctcctttttctcctcccaccccaaaggctgtctcttacctttgtacagaatcattcaaaccaaacatatcaggagc

SEQ ID NO: 39226 - DNA, 201 bp, Bos taurus
atgcatgatacctatatcactgattttcagaaaagtcaacagtacgctcatcagtaaagtcacgaggaacacagcaatctttctttgaccactcaggggcrtttttggctctttcagtatcagagtcaatattataaacatgccctgatatttgtcctgggaaagtaaaaatacatcttgttcgagataattacatactat

SEQ ID NO: 39227 - DNA, 201 bp, Bos taurus
aggaatcacctaataagcaccccaaccttgaggaaaaagagggaaagaactggggactgaaaatgtgggcaaagtgcctggcgaactcatttgcctgcacygctagaatatcagcttcctgagggtggggatttttttgtctgcttggctcacccactgtgtttccagcaactaaaatagtgcctaacacacagaagacac

SEQ ID NO: 39228 - DNA, 201 bp, Bos taurus
aaatgcctttactttgccaattttaatagtagttttccaatttgggtaatttaaacatgtattttctttctcctttctaaatcaatccagtcataaatctrtgttattctttttccttcaatttgtttatcaataacactagttcacttttctacttgtgaatatactacttttatccttattaattccttactcctggtt

SEQ ID NO: 39229 - DNA, 201 bp, Bos taurus
atttgacttctgtgtacctcgtataagtggaatcctataatatatgtcttttttgtgactggattatttctcttagcataatgtccttagagttcatccaygttgtagcatgtgttagagtttcttcctttttgaggctaaataatgttttattgtatgtatattttgtttcttcattcattcattaatgaaaacctagaa

SEQ ID NO: 39230 - DNA, 201 bp, Bos taurus
ttccccaggccactcctaccagctgactctgttccaggaagtttttgacgatccacagagggagacagcgctgaggactactcaccctgacctaccagtcrtacaggccccttacagcccaaggaccccaaacaatgaatcagctgcatcagcttacatttaccattctgccccccaactgctgttcaatgccatcaggct

SEQ ID NO: 39231 - DNA, 201 bp, Bos taurus
taaactgttttattcttctgaacccctgtactctagtctttggtcataatactaattctgggataataaggaaaggttaaaagatgcccagaataagaagrtaccatcatcaggaaataaatggatgttttgacatttagagatgtgaacttaagctgtctgtaagtttgtttaagtgaacattttttgatgaagaagaga

SEQ ID NO: 39232 - DNA, 201 bp, Bos taurus
atattctggcatgtggaggctgtcggcaacgtccattcccaccaaccttgtattggggttcaatcagctcctggctctctcccacatttactgtttgtagrcttttgtggatgtcaactcttactggtgggatttggtttcgtgctatcgttttgattgtctttcctcctgtagtaattagggatgctgaacatcttctcc

SEQ ID NO: 39233 - DNA, 201 bp, Bos taurus
aagaaacattccactgagagattaaatcttaaagaaatgtagtacatgtataccttaggctcttactcagacatgaaaaactgtcatgaaattatgaaatyatgccactgattcaaacaaagttggatgttagaggatcatatatttagtgtactcagcaacatagaaaaaacatagcagatgatgtcccttctccacaaa

SEQ ID NO: 39234 - DNA, 201 bp, Bos taurus
acagcagatgaatctgaaaaagaaacatatgctttacatacatgacataggtcaatcaggtggctggatactgacaacaggcgcaacactgcacaccgacyatactgcagcataccacaggcatgaaatgaaagaagaaagaagaaaagccttgcccagtttattcctgctgacatcctgacccaggctgctatcccatca

SEQ ID NO: 39235 - DNA, 201 bp, Bos taurus
cctggtaggccacagtccatgggattgtaagaatcggacaagacttaatgactgagcatgcacatcctaaattttgcatctggggtgtatgtctcacttcyttcacccttgtcctggccctgtgagggagtaccagtttctggacttttctgtaagccactcctatgtggtggatgctcatccttgttcagttggcttcac

SEQ ID NO: 39236 - DNA, 201 bp, Bos taurus
agcaaggacgccaacaatagacacacaagtgtaatatcattctatgaacgaatacctgtaaagctgttagaacaccggaaatctagtaagcccacatgttygatatcattaatgcagtgcaatgatcattaccttcatggaggtaagaaaaaagggtccagggaaagtcacccgctgattcagcccaagaaaagcaggagg

SEQ ID NO: 39237 - DNA, 201 bp, Bos taurus
cttgcctgtgtcttctcttgtctactttaaccatcatcgccattgttctgcattcatgatttcatggttgaaccattgcaataatggttctcagtgtctgytggtcgctggtccttttatctctcccacgcttctgctcccagagttgggccctggccacttggaggggcacaggccacacctggttcgagtcaattaaat

SEQ ID NO: 39238 - DNA, 201 bp, Bos taurus
tgagatgcctgtggaagaggttctccaccattcacagcacgtttggggaccagcctcccttggacacgaaggtggggctacacatggagaagggcttcttrtactgcctgtcccactagatttatttggtgactcagtggtaaagaatccacctgccaagcaggagatgtgggttccatccttgggccagaaagatccctt

SEQ ID NO: 39239 - DNA, 201 bp, Bos taurus
aattcaccagcaatggcgccttgaggatacgtcaaagataccatttccatttccagtgttcagcaggtgcaattgtcaatcaaagatgctccctgagtccygggaaaccttggcatcacctctctgctactgggtgtcatgagagcttacagttattgaaaaaactaattacaaatagtttatttcactgactgaatcgca

SEQ ID NO: 39240 - DNA, 201 bp, Bos taurus
aaggtaattttcaacggtctttcaaagcaaaggctggttgggcatgccaggggagggtacaggtggtccatgcctccacaggcatggcctagcttcatccytccatatgggtcttttctgcttcctgacttcaaagtgagcatgtgatccaaacctggccactctggcctggctagctcatcctcctgttcatcatggtta

SEQ ID NO: 39241 - DNA, 201 bp, Bos taurus
acatattataaaatttaccaaagtgaccatggtgaggtggacagttcagtggctttagggctgtgtttcacagctggactcagtctggcctctcaaacacrgactgaaatcctcagctcagcgtctgccctaagttaatatcagagaccccacaccgattataaaagtcagaccttggaaaaattgtctggtgattctccc

SEQ ID NO: 39242 - DNA, 201 bp, Bos taurus
ggtatgagggctcagtgccaggcaccactggcatctccccagatcctctgactccaggttccaaacctcagcattttctgccagatggggcgcagttctamttcaagtaagctgtgcccccatgaaggtatgagccagcggaagacaggaagaactgagagataagactttaaaagctttgagcttgaggtaggaaaggag

SEQ ID NO: 39243 - DNA, 201 bp, Bos taurus
catccctgccttgggtggggctgggggagaggaaatggccaggtccagcatatggaatatgtatgccttgagtcccagtctagacatctacacagacaggrgcagggtgaggagggaagggccagctggggaagcagatggacttggttttctttttctagttttggctgcagtgggtcttcattgctgtgcatgggcttt

SEQ ID NO: 39244 - DNA, 201 bp, Bos taurus
cctgacttttctgcctgcagcagggagtgggctgggagcaagctgcaggtgcaggggcttcagtgctgtcagtgggaagccaccaagggggtgggcaggaygcagatggtccctgccactagggcagaatgaaggtcaaggatgaggctagctgggcattgacgtagcagtggttcctctttcctctcctctctttttcta

SEQ ID NO: 39245 - DNA, 201 bp, Bos taurus
ctctgaccccagcctgggccctggctttcccgggataaatgatgccgtggtcctggctgagcagttggagagggaagccaaggagggcgcagccccagggrctgtgagcagagaggtaggtgggcccgggagagaaaatgtcccttgagcagcagttctgaccaggaggtggttcacagagtcaggaggctggcttctctg

SEQ ID NO: 39246 - DNA, 201 bp, Bos taurus
acccttggttaggacaccaggactctgctggttgggcccctaaggtgaaaacaagtgggctcctgtaacctcctgggaaggtgtaaagtagtgtagagtcratctcctctccccacatttgtcccagggaagacctcctcttttccctttggttctatgtgatattaactgtttttatggctgtcatgataatgttgaaca

SEQ ID NO: 39247 - DNA, 201 bp, Bos taurus
cacacacacacacacagcacatattaaggtcttaaaacggatggtacgtgtttccagattgtgattttcaattgctgccagactgaaaaggcagagaaccktaatgatcaggtctggattctttcttgggttagcttttgtaattcttgtcataccacactgatttcaaggacaagaaaaaccaagaggcaagaggttaga

SEQ ID NO: 39248 - DNA, 201 bp, Bos taurus
tattgtctagaatgactactaatcaaacatgtatgcaatttcttaaaaaaaaaaaaaacaaaatctaccctggtcctctcaacaggctatgggataggaamcaccagtcacaccaacccaacctgaccctcaagtctaccgagaagcatcaactccttctctctccctcttgtctgtttcccatccagttaccaatgacgg

SEQ ID NO: 39249 - DNA, 201 bp, Bos taurus
tgctttgcatgaaaatcagagtctacagaaggggaatgatggtgcccctagagccagccagtgccctgcggagcctggtgggacctgagttattggaaaarctgacaaaattgtccagtctctgaccaggtctttgttttgttttatttttccttaagatgtgtgtttgtgtgtggaccatttttaaagtctttactgaat

SEQ ID NO: 39250 - DNA, 201 bp, Bos taurus
gatccaaattgcaggggtgggcagcagacacttcgtaaggtgagtgtttctggcattacactttgaggagcccccctcccatgcccattcccactctgagycctggactcagtggagaagcaggactatattaatacaccagttggagggtacctcaggacagacatgcgctcctgctggtgccaaaactatgtctttgga

SEQ ID NO: 39251 - DNA, 201 bp, Bos taurus
cagcatgtgcactccggactgggacagacccatcttacccaaccaaatactgggaggacacggcctggccagcctggcctgcagcagatctctggtgcagsggttgaccagagagctgtctttgagtgggtggaggcgggggtgtgtctggtggagggagtgttgactgggaggacagaggctggccaagcatttcccatc

SEQ ID NO: 39252 - DNA, 201 bp, Bos taurus
ccatcagtcccatcaaataaaatggcagtgagcttactgaatgatgaaacatccaaaggcagattccatgacctaccccctttctggccagattgctgccyctgaagcttccctgtgcagaagctgctcaaaatgctattgacaaggggcttcagaagctgctatttctctctggccattcccaagcccacatcgttgcag

SEQ ID NO: 39253 - DNA, 201 bp, Bos taurus
tcctctgaggtctgtggctttgtaattagtgttggcttggttactgggtgctttcaattttgagattagagtgctggtaataaatgcggctagaagcatcrtgaaaaaattctaacaggctctgggaagaataaaatagtcatagaatcaaggtcctccaaaatggaccactgaggatctcaagctgtggtcctgataaac

SEQ ID NO: 39254 - DNA, 201 bp, Bos taurus
ctctagtcaattgctattgatgggggaacaccaagaaccctgttcaatatcaataccatatatatctattagatggccaaaatctggaagatggacccacmaaatactgtcaaggaagagaagaaacaggaactgtctttcattatcagtgggaatgcaaaatggtatggccactttggaaggcgatttctttcaaaacta

SEQ ID NO: 39255 - DNA, 201 bp, Bos taurus
aaacttatgaccatatgcaaaaatgtctcagtgccaatatgtacacaagtacctacaaatctgtaatgcacagccctgtgaacacagccattgagggcagygtgttgaatgctgcaggcctgcgtgctgggacagaatgccagacacgggacagagctgcttcccacaaagcctcatgggaacccataatcccaaattata

SEQ ID NO: 39256 - DNA, 201 bp, Bos taurus
gctcttcacaggcaggcagatgttgttcccctattaaaaatatgcacgtcaacacagaaaagataagtacctcacccagggccaatacacccatacaccawatgtgtatgttcataactcacacaatgacactcaaggatacagagtcattgtttaaaggcccaaatatataattaatgtgtgtatatatatatatatata

SEQ ID NO: 39257 - DNA, 201 bp, Bos taurus
tgtcctgccctgataaacccactctgggtggggggtgagggactaaatcacatcttcctactccccagggtaggcagaggctgagtaggcccaccatgccrtcactgcttgttacatgtgctgcagaagctgcatcttatattaagctgtgtctcaggatggccctggggctaaggaaacccgccacgcacgtgtcatgtc

SEQ ID NO: 39258 - DNA, 201 bp, Bos taurus
gtgggtggggggatgggggcacattctcagccatccactactccctgcagggagcctcagctcagattgctcaggaaaagccatagctgtggcagggcacrggctcatgacatatagcccacctcacaggctctagggccgttggtccccaatctttttggcaccagggaagggtttcgtggaagacagtttttccacaga

SEQ ID NO: 39259 - DNA, 201 bp, Bos taurus
cctgcctgccccagctcctgttccaggagagcaaccccggggtgcgctacgagtacatcatccacagggaggcggacggccacgaccacatccagccgccygagttctcctggcgctatggaccctggtccaaatgcactgtcacctgtggcacaggtgaggagagggctgggcacggccgctgcccagcggggcctttgt

SEQ ID NO: 39260 - DNA, 201 bp, Bos taurus
tgccccagaagcagctgaccccacagcaggtgctcgccgagtacccgctgactgtcatcctttccacagggcagggcgctgggtgctatggcctgaagccmctcatacactccaaatgccccatgaaaacagctgctgcagagtcggtggagcagtcagccttgctaatctgtatggaagtacagagggtgcggctataca

SEQ ID NO: 39261 - DNA, 201 bp, Bos taurus
ccacccccagatggaggacaatgatctctatgacgctatcactgtgggcctccaccaaactgatcctagcctggaatacccaccagaggaggccagcagcmcccctgcctctccaaagcaccaggtctcctccctccacaaaaggaggagcctggatgcaagtccccggaatctctccgaggaagaaagcatggaggtgag

SEQ ID NO: 39262 - DNA, 201 bp, Bos taurus
gataaatagaagcaagcaacctgaggagaatactccattaaatcctttgtgatcactattgccattgccctaaaagaggccctctcttttgaactattacrgcaatgatgtgaggcggggcatggcatataatttcctagttacagatgggaaacccaaggctcagtaaggcaaagtgactggcccaatgccactcagctg

SEQ ID NO: 39263 - DNA, 201 bp, Bos taurus
ggagtgcagacccaccctggcccaggagcagcagcctgccaggggccgcaaggccaggagagatgggcaagcctgagatggagccctgtgctcctggggcyggtctggagggacgaggagcattacggccatggtaatggcttctgactttagaacatgttaaacaagggttcaaagctctttcctcgtagctattctgca

SEQ ID NO: 39264 - DNA, 201 bp, Bos taurus
acttgttcagaaagatattagttacttgtttactcctggcaggtagactacaatataaatttagattcctcaaccttcagctattactgctcctttccttygcataacagtcacaaagaaaaactgctgccttctcagctgctgggttaaagcagaggccacttttcagatccacccttacttggtcatatagtacctgca

SEQ ID NO: 39265 - DNA, 201 bp, Bos taurus
gcctaaggccatggggctgggccagcagggcccctgggaggctaaggctctggcatgactccaggcaaaagtagcaaagctcagcagaaatatcccgacarggatgcaggtcagtggcctgggaggagctggcaataaggggtctgcaaaggcaagggctgccagccagagaacaaaagggtcttggagagaaggcccagg

SEQ ID NO: 39266 - DNA, 201 bp, Bos taurus
gttgaccggcgtggagatgagaaagttgtgttctcgcgcgaatcagaagcccggcgggtctcctctctgtgccctcctggctctttgctcagggccacacytacctttcagctgcctgttgcagtaccctcataactggttattctgccccagtcttcaccagccagagcgatctttctaaaatgccagtcagcttctgtg

SEQ ID NO: 39267 - DNA, 201 bp, Bos taurus
aaaaaaaaaaacacaaagattgtgccttgtgccaggctttggagacacaagcaggatcccatgtggatgatccctagacctcagggacccaagcgtactgrgtgtaatccaatccctcgccacctaagccaatcagggcagagcatagccccagccacagtgattggttcagaagagagtacttgaccttaagtattataa

SEQ ID NO: 39268 - DNA, 201 bp, Bos taurus
ctgggccttcccccaagtgggcaaatatatctaatgtcccatcagatgtgcttgaattcagccaacgtttatttagaagggctggaggcttaaccgtctcraggaggcatctgcagggccagagcctgcacaggcagaccctgccacgtgtctgcgcccgtctgagggtgagctttggccagcagccatggacaagaccgg

SEQ ID NO: 39269 - DNA, 201 bp, Bos taurus
gttgataagtgttatatatatatataagaaatttatttgagacattgcagcaaaaataattatggtgttgtcaataggctaggttacctcactaaaattcstagaaattcaaattaaacattaagaaatcaataaatcatctattgcattgctctaaaatgtaaaaacaaaaaacaaaaccaacttagctgttggttaaac

SEQ ID NO: 39270 - DNA, 201 bp, Bos taurus
tccgtgttacagctctattttatttagataataacaggaaaatccatcctcaaggcatgagggcatgtcaacacaaagacgcaaagagaagcgcgtcccascgcgtgggagagagagcgagaaagtgcgcaagcgggagagagagagacccccagccctttggctcctctttttatacgtttttcctccccctgggcctgc

SEQ ID NO: 39271 - DNA, 201 bp, Bos taurus
aagacagttttgtcctggtggccaacgcctcagagatggaccgccagagccaccccgtggtcctcaccatcaccatcctgcctgtcaacgaccagcccccmatcctcaccacaaacacaggcctgcaggtgagagcattgtaggaccacctcccgctgtccccgtccccaccagagaggcccagcaccgagctccccttct

SEQ ID NO: 39272 - DNA, 201 bp, Bos taurus
tcactccccatgggaaccactcccagacttaccctcccctcactcctcaggacttactgcatcccatgaaagaggggccccgctgggtatggctcaggagytctagttctgctgattgctcttactgtcctgccgcctccatcagatcatgtcattccaatcagttgtgatgtcatggatgtctcgctatccattaatggc

SEQ ID NO: 39273 - DNA, 201 bp, Bos taurus
gctatagaccatggggtcataacgagtcagacatgactgaagcaacttagcatgcacgcatacatgggccaggcattgtggccctatacatcacctatatygttttacttattctacacaatccattttacggatgaggatgctcaggctccaaagaagtcagaatcacagagatgaaattcaagcccaggcctgtctgca

SEQ ID NO: 39274 - DNA, 201 bp, Bos taurus
ctctcaagagtcttctccaacaccacattttgaaagcatcaattttttggtgctcagccttcttaatggtccaccccgaggcccttccaaggcatttctamccttcagcggtctgagggcatgcagcggggtacccactcacaccagcctggaaggcaagagggccagaagccagccccaacttcagctccagtcaaacaa

SEQ ID NO: 39275 - DNA, 201 bp, Bos taurus
gctacaagtctgagcctgagtgaaggaaagagggaagaaggaaatttggtggaagcatcctagacttcagtacagttttaaggaaagttcagcaacactaytggggagttttccagccaaagccacccattatccttctatctccaaggaatgggcctgccttattatcccatctgtgctcattcattagccaggaacagc

SEQ ID NO: 39276 - DNA, 201 bp, Bos taurus
ataataggtaatattcattgataatacaaacttgataccttgtggaaaatacagactaggtaataaaaccagtcacaagattgccgggtagtgagcagtaygcagaaaatcctttgtaaaacagaaaaaaatacataagtaataacgcttatattgattttatttaacaaacacgtatagtctgtataactcttattatgt

SEQ ID NO: 39277 - DNA, 201 bp, Bos taurus
ttcttttttgagggggggccatactgcatggcttagggaatcttagttcctcaaccagggattgaacctagtcccagcctttggcccaccagggaattccytaaacattttgaatttctcaagggctccaaagggaacacctgtgttgtcttttcctgggcctcagaatgtaaaccttgctctgggtctcttctggcaagt

SEQ ID NO: 39278 - DNA, 201 bp, Bos taurus
gtgggcccagccctctggtcacccccgtgggtaaccccaggggaagtagtcacatgatgtggcacttctcagctgattgcttgaggtcccccaatgtgctstgggccttgtccttgagtgagccgaggtccaagccagggaggctggccagctgcccaaggaccgaggccctctcctcctcctcctctgtgtcctcctcaa

SEQ ID NO: 39279 - DNA, 201 bp, Bos taurus
agccaggccacactgcggccacagagatgaatgagaacagggccgtagactcctgcaggaggacccagcccagcccctggggaggggggcaggaatgcctytgaaagggggtaggggtggccagtccaggtgcaggaacagaatgtactgagagtgagaggcctggagtacacaggtgccccccctccttgagcagcatgg

SEQ ID NO: 39280 - DNA, 201 bp, Bos taurus
ttagcgtgctaagtgcaggacagagttcccctgtacaatatgtgtgtgacaagctccaataaataagtagcactgagtgttacacaacaataggtttgttrtaagttctcatggccaaagaacctctgtgccaaaggctggcagcaaaatggcacaggaaggcggccagcctctagtcttaacacacacttggccctggta

SEQ ID NO: 39281 - DNA, 201 bp, Bos taurus
ccagcatagaaacagcttagtgttcttcgaagcacctcatgcttgtattctcccaagcctttgcgcttgttctcgtttaggcctatagcacctcttccccyggtcactgtctgttctaccttcaatactcttctcaaacgttctctccgggggctgtgggcctccatgtgcctaatgccctcactgtggtccatgtctctg

SEQ ID NO: 39282 - DNA, 201 bp, Bos taurus
cagggttgggaaagccagctgcttcaggatccatgtggggggctggaaaacagtctatcagagttggaaggaccgagaccttctggaggaaagagtggccytgaaggggttgcgctgggatgttggctgctgagaacctggggatgatgggcagtcagcctccggcaggtgaacttagagtgctgccctttctctgggtgg

SEQ ID NO: 39283 - DNA, 201 bp, Bos taurus
ggagacacaggctttgggaacctcctgtcctccctacagcacgcctgcatggtatgtgaggagcagaggttagggcagggccgcatgcctggaaagtgctrgaaaagatcagggatcatcatcatcatcatcatttttattcccatgattcctaccatcccagggcaggttctatacaaactacctcggctatttttgaaa

SEQ ID NO: 39284 - DNA, 201 bp, Bos taurus
tggagggggtggcctgatgcctgcgcccctcctcccgctgctggcaggactcctggtacagcagatcctcttcttcctggggaccttgaccctggccttcytggtgttcatgcccatgcttcacggcaggaacctcctgctcctccattacctgaagtcctcgtggtgagtgaggaaggggctgagggttctgagacccct

SEQ ID NO: 39285 - DNA, 201 bp, Bos taurus
tcccaagagtgtaataacttgtgaagagtcagtggtcttggtgggactgtcagctgaggaatggaagatgggcacagaccatagcgatcttgggcaaacckggcctgagaagtaaaggggctgggccaggggagtggccttgagtcttgccattgactacccgaggtttcactcttcactgccctgcaggcattgccatga

SEQ ID NO: 39286 - DNA, 201 bp, Bos taurus
ggcaccggggcgcagcttcccgaggaggccgtggagagttataaataacagtgacgcttttctacgtagaagttgcaccatggggtggggagggaggggarggcaaattgggagaggagacgtgacatatatacactaccccgtgtaaagcagatagtagcaggaggctgctgcatagcacagggagctcagatctgtgct

SEQ ID NO: 39287 - DNA, 201 bp, Bos taurus
tttgctggcttttaaatgagcaacagacatatttgttgtggtgtgtagccatggaaatggacaggatgtctgcaagatcggtgactggttgcatccagacrcctccttaccacccaggaggcacatccacccaaggagccccagcgggcctggaaggagaatcataatgtccaaagctgacatctccctcttttgccatca

SEQ ID NO: 39288 - DNA, 201 bp, Bos taurus
gagagggcctgtgtttgaattttagctctgccacttgaggacaaaggctatatgaccgttggcaagttatttactgatccctctgatcctatttccttctsagtaaaatggagataataagttgcatttccaaaggctgctgtaaaaactaaatgagataacatgtacagaatggaggtggaggacagcacaccgacactt

SEQ ID NO: 39289 - DNA, 201 bp, Bos taurus
aaggaaaacaaaggcagcacttgtatgtggactgatgttaagggcacggtttggtttcaggttctgattctagagtcctggggcagctgctgctttttttyccttatttatttttggctatgctgggtcttcgttgctgacaggcttttctctggttttggtgatcgagggctattctccagttgcggtgcacgggcttct

SEQ ID NO: 39290 - DNA, 201 bp, Bos taurus
tgaccaatgaacatgtactttagatggagaagatgattctgaccattaatgaatttaaatgaaagaatgacctgtccagtttaatgatggacttatttatracacagattcgagctattttgagttcagtatcctgatctttaatttctctcttagcttaaaaagtacaccttcttttcacttacattttaatatgaaata

SEQ ID NO: 39291 - DNA, 201 bp, Bos taurus
gctgttacagcatgacagcaagcacaggcaacagataaatgaacaggcagcctgtgttccaagagaacgttatttacaaaaacaagtggccagtccacaarctggagtttgcagatacctaattaactcaatggaacaaacacgtatgatggacatacacatatgcagaacatcaaggccagatgctgaggagtgtgctgc

SEQ ID NO: 39292 - DNA, 201 bp, Bos taurus
agcagccaggaagaactgtgtttcaatttctattcaatcacttgcatgctctctggctttgtggctttcatttaacttcttctaaccctagttttctattmcatgagataagaaatatgtgactgcccatctcttagagatattgtgaagattaaataaggtcaatatgataagtttgtcacctagcaggcactcaacaat

SEQ ID NO: 39293 - DNA, 201 bp, Bos taurus
ttctgaaagaaaatctgacagtctgtacatctgcaattcatactgccttcgcaacccagaaagccccagggtccttccaaaaatacttgtaggatgccccyaggaaattctctagattgataaggccatggttagggaccacactttgccatcaccattctgccttctctgcatctggaagttaggcttcttgggtagtct

SEQ ID NO: 39294 - DNA, 201 bp, Bos taurus
gatttttttcaaaacacaacagaggaagccacagaacacttttaactccagaactgttttcagcaccatgttgcagatttgctgggtagcagagcaggccratttcaagcccacaggtgtgttgggagtttatatgatccctcagaactttagagagaaccttcctcactgcagcacccatctctgccttctcagcactgt

SEQ ID NO: 39295 - DNA, 201 bp, Bos taurus
gcgtcagctttattccaagcaatatttcctggattaactttccatagctttatggattaactaatattataatctctactgtatagaggatgagcttgaarcataaaagattgaacaatgtaaccaaaatcacaaagctaggaaatcttcaagtaaggtttggaatccaagtagcttacctccagcccatgcccttgacct

SEQ ID NO: 39296 - DNA, 201 bp, Bos taurus
tggcatttgagcagaaacaattctaaaagaacaggaagaccatacattttgggatggagctgcttctacagctaggaaatactttggtccactgataaagraggttcggttcattcatgtccaagtcgatactcccactttcttgaagtccatcctgtcacttccttcaagcccaatctcagtcccaagttttcatcagct

SEQ ID NO: 39297 - DNA, 201 bp, Bos taurus
ttaaagtggtagaagctgaagaaatgttaattaaccatctcaaatagggcagcagaaagcaagataagctggtatcataaatcaccctgtctgcccagtamatctctgctttctacttattgtgggcatgtagaagctatgctgctgctgctgctaagtcacttcagttgtgtccgactctgtgcgaccccatagcagccc

SEQ ID NO: 39298 - DNA, 201 bp, Bos taurus
atcaaaattattaccaaggtggtaaatgatgaggcttcagtgtattcaaatgatgttgtatcatcaggaaaaatccatccaaagaatacatttagatatcyggcctttgaaagttctctagactaagcagtctatttcccacgtccaaattgaatgacagaagattcttttaatttaaattttaaagtttctattcagcct

SEQ ID NO: 39299 - DNA, 201 bp, Bos taurus
atacaaccaccaattctaatctacaaattctaaagacggcatgtttagatattcccatgatgccttggattaatttccactcaaagaggtggttgtttaaygagaagcaatgctgtttcccctgtggggcatattgatatataaggagctattactatatagggagctattgatatatagggagctatccagtggactttc

SEQ ID NO: 39300 - DNA, 201 bp, Bos taurus
gatctgatgttccagtttgctgcggaagtcccagtcctgtgtttcgtagcattgctacaaaattttactcatagccaatttttactcatacaaaaattackcatagccaaccctgtgacttgtggaattggactgctttggacaataaattatacaagctttgattaacgtagtctcttccctctcctacagtgtgatggc

SEQ ID NO: 39301 - DNA, 201 bp, Bos taurus
aaatgactattttgattacgtagataattctctttttggcagcaatagctacatttttaaaaatagaccttacaaccatattgccaaagattaattaaaamttactgcagtcacatgaatagtcacaatgattcactgtgaccatacgaagtataggcactttagctaatttgaaccaaaacatccagccacaaaactcag

SEQ ID NO: 39302 - DNA, 201 bp, Bos taurus
aaagaatcttttaaaattcagaaaatgtttgtttttgagctaatatgacctcccaagtactaaatacgtatccatttctataccacagtttcaaaattctrtaaaacattttaaagtgcattttgagggaaaaacatgtgaaattacacatttaaaaaattgcaaggagtttatactgttttaagggttgattaccatata

SEQ ID NO: 39303 - DNA, 201 bp, Bos taurus
aacaaaaattttatttatttgtaatcttgcaaacaaatcttgtatttctattcttcctaaaatttttaaacaaaaattttaatcagatcaactaaaacttrtcagtcctctgattttatttaattatacttaatgtgtagaacactgtgccctagttcagacagtaaatagcatttaaaacttttacttaggagaatggca

SEQ ID NO: 39304 - DNA, 201 bp, Bos taurus
ataatttacgacttggtgatggagatttggtttgtttttagaacaaataaaaaatgctgcttagtatgtgaagaaaattcatactggctacattaatatcmagtcctggtctctcaagcagttctgtggttctgatagaaaatgccatcattccctgctggaacctgtctgaatcttgtcagctcttctgacagtcagaag

SEQ ID NO: 39305 - DNA, 201 bp, Bos taurus
ataaatatcacaattcatttattgactttgcatcctaggaaatatcaagaagaattgtctgatatgagtttagaccttgggcttgctaaaaatcaatattyatctcttaggtcaatcaatttattgatattcatctcaatgagaagtcagtatgtatataatataactgtgggctaaatttctacacagaaatattataaa

SEQ ID NO: 39306 - DNA, 201 bp, Bos taurus
aaacagatacatcttccaaacagtttgaatgttgagataggtttctttggtttatatgcaaacccttgggtattgttcttttaggaaccatgagggaaagkttcatgtggctacttgtctagtacgttgtcttggaggagaaatcttccattttcttgggtttgtcaaatttaaatgtcaaatgaaacaaaaaacataaac

SEQ ID NO: 39307 - DNA, 201 bp, Bos taurus
aagtgctctgtagtttggggaggtttttagtgcaatcttggattatcttcactcaataactttattcactaattctccactatgctctactgtcttgattygtaatggtattaaaaaaacatagggccttataaaacagattgcatttaaggtattttgtgaatacgtactccttaagggggaaggatcttcaaaagttca

SEQ ID NO: 39308 - DNA, 201 bp, Bos taurus
gatacacatctaaggggcctattctcccaaaacacagttctcctcatcctgtttctcttcccaaattcctctcaaagtacactgtgggtcagtaactacamtggccaatgacagagctgggtgctgagcaatactatttattcttggtttacactgtcttcctaatgtttgagtagttctcaatcatggatagcctcagcc

SEQ ID NO: 39309 - DNA, 201 bp, Bos taurus
cccagggatcaaacccgggtctcccacattgcaggcagacacttttaccatctgagccaccagggaagcccagtttattctgagagtctatcagatgtcartgttccaactttaaatggcgtccctcttgttccagatgcacctgaaattttcacggatagaacttttaaattaatttctactcttaactattttgattat

SEQ ID NO: 39310 - DNA, 201 bp, Bos taurus
tctgtcttgagttttatgtattttgggaaaaaaataattaaacacaattcaatcagtattttgacttaaaaaacaaaaataaacaaagaattctaaactgyacttctgctgtaagcacactacccaaatattagcaatctgacttaaattgcatcttcatctctctatataataaaatactgtaatctcctgtgcaaaaga

SEQ ID NO: 39311 - DNA, 201 bp, Bos taurus
catgaattcttgtttttaaccaaaactaaaaattactgagttctttccatccatacccaccaccagtgagacctactacaggaataaaccttccttgaacmatatttcttttatcatcctattcttaataagaacatgcatctcacacttccatatgcatgttaataatcctaggatcttgttaagatgcagattctgatt

SEQ ID NO: 39312 - DNA, 201 bp, Bos taurus
gacattgagctttatcagttgtttgtatattttggaaattattcccttgtaggattttcttccattctgtaggtcatctttttgtcttctttatggtttcmtttgtcatgccaaagcttttgagtttaatttagtcccatttgtttatttttgtttttattttcattaccttaggagatggttgcaaaaagatactactgg

SEQ ID NO: 39313 - DNA, 201 bp, Bos taurus
ttgtcatgttagaaagcagatttttttttttaaaccaagtgttagacaccataatgtttggatcacataacctgaccttattccaggcaacttaaactccrtttccaattagcaagcatgcttatagtggagatgaagtttatctgcctattaagtctttcctattatatcaatttgaccagacatttgtattctctattc

SEQ ID NO: 39314 - DNA, 201 bp, Bos taurus
ggatgtattagttgtctgataatattctgtagcctacagatgcttggggtggaatgtagatttcttaaaaaagaaaggcccaatggcattacttctgtaargctccaggttgtttcttgtaagtggcattaaaagaaaatttcccttttaaatatgacttggcatcagtgtaatatttccaaagcaataaatttagcataa

SEQ ID NO: 39315 - DNA, 201 bp, Bos taurus
cactacgttctatagagtgctgtaatatttgtcaattaatattattgatactataaaactttaaacatattttggttcctcaaaattacttggaaaagttyagagtcacaaatgagcgtcacttcttgagagtcttgtccatccctgggtttcagaaaggcccaggtaacttggtaggtggagaagggacaggtctttatg

SEQ ID NO: 39316 - DNA, 201 bp, Bos taurus
atataatacttaggtaattgactagggctactcatactactaaaagacatttaatctatgaaaggtaccccttatttggtttgatcaaaataactgaatcrcaagggttgactaacaagcttcttgatgaaggtgaaagaggagagtgaaaaagctgacttaaaactcaacattcaaaaaactaagatcatggcatccagt

SEQ ID NO: 39317 - DNA, 201 bp, Bos taurus
tgcctgtcagtttataaatggtaatgagaattcagaaaagagtcaatagtggtggggaggggacttgctaagactaagacactaagctccaaagcaggatytgttagagagaggtgagataaggctagtaggacatggaagcagactttcactagaaataaaggtggggcatgtgaatgtaaaaattattcataaagtaat

SEQ ID NO: 39318 - DNA, 201 bp, Bos taurus
tctgtgcttctgttcaacataagaaatatctgagtgtttaccatgttcaaaacatcagtaaaatatgacccctgtgttcaaagagtttataagctgtgtayaatttattttattgacctggacttaaaatgaattagtcagcacattttgaaagctagcctccatagtgttataattaacctccaaagtcagattgactct

SEQ ID NO: 39319 - DNA, 201 bp, Bos taurus
gtatttgggagctgatagaattgataacaaataaacatgcatatggacagtattacagtttctggactgtattaagaaataggatctttatgaatcactgmaatttttatctttatgtttaagacatttcctatttgtctatctgctacttcttgggaaaaaaactctaaaattaaatctaatagaaatattctatccact

SEQ ID NO: 39320 - DNA, 201 bp, Bos taurus
tgaagccggaaggacacaaacataaagagtggttacatgaaggatattcaaaactttgtgagacctaaactactgagctcaagaatagtccccgtctcatmcaggatagcagtatggatcccccatcctcagcaattagccaacataattaggctaagtgaaaaaaattcaaatatacaagaacctgtattcaagtcaggg

SEQ ID NO: 39321 - DNA, 201 bp, Bos taurus
attatatgaaaatgcatttgtagaaaagttcaacaagataatgaaatattgaaaggacaatggcattatgtttaatgtgttttttttctttatgtgcaccygtactctctaatttaccaacaataaaaatacaatatttatggtagagcttgtcaggttttgcaatatatccacgtttatatgcaattcttagctcccacg

SEQ ID NO: 39322 - DNA, 201 bp, Bos taurus
ttaaatcaaatcatgtcacttatacaagcaattacatttctgtaaagcctaaagacagtaccattagtctacacaggaagtgctggccttagccctgtacrcagacaatgcaaaggagcaattcacaatccagactgaactaaagtggaaaggaaaactttattgtggcctgcaattgattatgtataagtgcgagtttac

SEQ ID NO: 39323 - DNA, 201 bp, Bos taurus
agataattaggataatagactctttaatttttctctttttttagttgaatgagagactctttaaattctacagtgcttaacaattttcaaaggtttcacayacatgatttaatgtaatcccgtaataactctgttttcccctacctccatattgcctgtcttccatttctctccccattggtaattccagtttgttctctg

SEQ ID NO: 39324 - DNA, 201 bp, Bos taurus
tttggggtccattgtaaaaaaattcaaatacacacacaatcataaaagaaaaaattgtcaatgattctatctctgagaaattattttgttattgattttakatctcgttattccaggcttcttctgtgcatgtttgaaaaagttaatctggcacacactgatttttaagttcctttttttttcacacaacttcccatgtgt

SEQ ID NO: 39325 - DNA, 201 bp, Bos taurus
ggacccctataatgcaaatgttagtgggtttaatgttgtcccaaaggtctgtcaggctgtctttctttttcacacttttttcctatattctgttctgtggyggtgatttccaccagtctgtcctccaggtcattaatcagttctgcctcagttattctgctattgattccttctagtgtattagtctggagaaggcgatgg

SEQ ID NO: 39326 - DNA, 201 bp, Bos taurus
gctcaagctaaatgagtcacagtgggcatccagagaggccagaactgctgcaagcagcctgccccatctcattcgctttggcaaagattagccctacctayccccgtcatggggcctcaggacagcccccaggggcaagagaggccatcccatttacccagctcccaacaaccattcctaagaactttcagagccaaacat

SEQ ID NO: 39327 - DNA, 201 bp, Bos taurus
agagaagactttcaaatgaagtaaccattgaatggagtcttcaataagtttctcaagcttgagaaaaataaggcctcttctttaagagagtttgatctgtytgtgagctgtgtattcacaattcttcaccacttttccctatcctaactcaaaatatctgtgcagtagcagtctgcactgtatttagtttgtgagtagtga

SEQ ID NO: 39328 - DNA, 201 bp, Bos taurus
agacgattttcacgtggctgttcttaagcctgattcataaaatggaaatgaattacttcgttgagaggtgctgtagctaaatatatactttcaaaatacaytggtcaagatattaattgtgaaaaatataacaaggcacccaaagctacttagctattaaccaaacaaaccctactgccaccactagcttactccccagac

SEQ ID NO: 39329 - DNA, 201 bp, Bos taurus
aatgacttttaaaaaccagtattaggaaggccgttctgggaaaaaatggaaatgaaaatgaattttaagaaaagggccaggacttccctggcgatcccacrgataagaattctcctgtcaatgtacgggacacatttaatccctggcttgagaaaattccacatgatgtcacagggcaacgaggcccatgggccacaaaca

SEQ ID NO: 39330 - DNA, 201 bp, Bos taurus
ctctaagatttttttaatcttaggaaataaatgacttacttaatattcaaaagtcattttatgaaagaaagagctctaagaaatattaaagcatgtgttayagttgatagaatatatgagcaaacccacatttccaataattcaggtttcaataagttgatttccattggctatgataaagtctcttatgactgccccctg

SEQ ID NO: 39331 - DNA, 201 bp, Bos taurus
ccaccacaagtcaccagcagcccgggcaaggcgccaggagtgagaaggctttttgctcttttgaagcaagaggtctgagactactaggcctgaagtacacygagctcaggtagatcgtttgagaggaagctcaaatccccggggtccctcttaatctcctctggaagtccgagggagaaggggccggggccagtgatgcaa

SEQ ID NO: 39332 - DNA, 201 bp, Bos taurus
gactaaagttagaatcacttggagatctttaaaaaatgcaaaatattcttgagatttaattgatttatttaatatttatcaagcaatgtttttgtcactgrggttatagaataaataagagttttgttctaatggagcttacattctagttgggagagatgtacaataaaccaacaatccaatgtcagctagcacctacag

SEQ ID NO: 39333 - DNA, 201 bp, Bos taurus
gaaactggagcagaacccacttaggaaggtgttgcaggagtcagataggatgaaaagggccttgaaaagatgtgaataagatattcaagaagacacacatyacttgaacatggtagtgagtttttgtgatgtggaacacaacaccaacaacaaaaaaccccagaccacatgtttcatagatcatagggctgaatccgtgtg

SEQ ID NO: 39334 - DNA, 201 bp, Bos taurus
cctggtgggctgccgtctatggggtcgcacagagctgaacacgactgaagcgacttagcagcagcagcagcagtaaatgccaggagacagggatcatttgrggtatcttagttggaaaagaactgattagtttgacatatgacaatctaccaagagagatacccattaagaaatcttgctcaggggaattccctggaggtt

SEQ ID NO: 39335 - DNA, 201 bp, Bos taurus
cttacaccacttttttccatttttcggaaaagagaaaggacctatatggttagtaatttgacatttgagaattatgttacatggagtgaaatggccgttcmcattgtttcagtgtgtaggacactgccactcttgcctcatgttttaacttaaatgttgagtatggctctggttagctataagaggtggaggattgtgggg

SEQ ID NO: 39336 - DNA, 201 bp, Bos taurus
taaataaagtcaaagccacaatgaaatagtgcctcacacctgtcagaatgactgttccaaaaaaagacgagaaataagaagcattggcgagtatgtggacmacagggaactcctgtgcagtgttgttggagatgtaaaatggtgcagtcaccatggaaaacagtatgaggattcttttaaaaattcagaatagaactctca

SEQ ID NO: 39337 - DNA, 201 bp, Bos taurus
ccttacacctgaaactgctgatatcttccctttactgaaaacacatcagtttacaaaaattattctacacatttaatcctttttatttttctaaaagcccmagtatatgtctgtagtctcaagttaaatccttataatttagtaggtgcttattcatatttttaaaaggaggaggtctttataaatagaggttcccgtagc

SEQ ID NO: 39338 - DNA, 201 bp, Bos taurus
tgcttctggaagaaggcagtggcatggctatgtcagctctccttcctccctgcctggcaggtcgtgtgccctccctgggtcagtgaaggaccgtctactckccaggctctgcagtttctctgtgcaggtgctggacatccttggaaatccaagtgctgtcctgcttggggccattgctgacagctggggctccttgtgagt

SEQ ID NO: 39339 - DNA, 201 bp, Bos taurus
gtctcctctgttacattctctgggttccatgtttgtcctgacttatgcgcctcatccccattaagttgaatgagttttactcgttatcaacagaccatccyttgtatatggggagctaccatattctatatttctcaggaaacaagatgccacgggagtaatcttacacgggaagataaccacagtcttccataaggcctc

SEQ ID NO: 39340 - DNA, 201 bp, Bos taurus
aggggcagcatagtgatatattagatcattttccattcttgcccactattttaatagttttctagaagatggaagggccctgaggagtattaataagaagrgtatggggaggacagccagaggtcagattgtaatgaagcttaggtagttaatgtacagaatgacagataaaatgatctcgatagattgggaagatgggcc

SEQ ID NO: 39341 - DNA, 201 bp, Bos taurus
tgacaccagattctgtattttcccattacctaactgaggcccactgttggcatatactgaacttggcaaattagtaatctagagtcaggaaatccattccygggtgggccaagggaaatttgaaggtctgtaaaccctggctgactttggggatgtggtgataagacagagatagcagattttaaactgtggacactttgc

SEQ ID NO: 39342 - DNA, 201 bp, Bos taurus
atcaagcacaaatgtaaaagagttaatgttccacaaactatgcttctaagtacatatttcctaatccattacgatcatttttcttgaggtgtgctgatatrcaacattatactagtttcaagtatgcaaaataacggttcaatatttgtatatactgtgaaatgaccactgcaaaaaatctgactcccatctgtcagcatg

SEQ ID NO: 39343 - DNA, 201 bp, Bos taurus
tgatagtcctaaagctgttttacagaaacttcagttctttggacaagtcctttcaattttctcctgtgacctctctcatggtactgacctatggccccaasaacagtcttcagacaggaaccctgcccctgacatttaactctccagtctagacagccaaccttagaagcacacagttcccttcctgtgacctggttgact

SEQ ID NO: 39344 - DNA, 201 bp, Bos taurus
gtgtgtatacgtcagtcccagtcatccgatttatccctcttcccttcttatcctttttccagccttcagcctccaccatggcctgccctgtgctgccttayctcatcagggctctctgttctgtctgcttggggagtccctcagagatccagggtcgaaggcctctgactgcagcatgcagcctaatccctacttctgttc

SEQ ID NO: 39345 - DNA, 201 bp, Bos taurus
atgtctattacatgtgtaaagaaacatttctacacaagtttaaataatcagaattgatctacagcaattctttcatttccaagttcttgattttcgaagayttattaggaataatagaaaatagaaatttctgaatgccgcaaagtcaaatgggtattctaaaataatgaataaaagaaaatcaaataaaaactgttgcct

SEQ ID NO: 39346 - DNA, 201 bp, Bos taurus
ccatttgtattatatatactgtacccttactgtagcctcagggaacctatagctgtttcaggtatgaatttcagcacaggggcatcttctgcaggagaggygagacaatcaaggggtgtcagcctcgctgctgcacgactgtgaggcaggggcattgggcctgaggcgttttagctgactttattcttctgtgactcattg

SEQ ID NO: 39347 - DNA, 201 bp, Bos taurus
gcagaatccaattttatttgagaagcatctccacagtttatagtggccttctcatagggaagaaaaatgcacttttgaagttctgttccctttctttgtaytgcttttactacctttaataggccaaattcaaagctcaaaatcagaggtgattttaaaactgaaagccaaccaatcataagagtaagaggacacaagctt

SEQ ID NO: 39348 - DNA, 201 bp, Bos taurus
gcctggacaatgaaggggcctgtctaagaggtggagctgaatccagctcttcttagtccatgtaaagtatctgtccacgtcacatcacaggcagtgatggygtcccatcaaattaggttattttatttattaggttatttcattttctaaattaaaaatgtgaacttaacaaagaatagttgagccttttctgaacaggaa

SEQ ID NO: 39349 - DNA, 201 bp, Bos taurus
gactttgtgtactgttgatatctgagatgtgagttctcagacagaacagaaaaagccgtccaatgcatttctcataactaacagtgatgagtcaactatgyaatgaagcaacaatgaaactaaatgaaagggacaagaaaaaaattataatcaaacatgaatttttttaagaagctatagtaaagcaggcagaacacaagc

SEQ ID NO: 39350 - DNA, 201 bp, Bos taurus
gggtgaccaacccaaatgcctgtggtttctacatgggagacaacttagagtggaaaaatccaaccactcgagctaattttaaaccaggaataacataatgktcattcacattagaaaggtcaatcatatttgtaaagtagctactgacattaccttaactttgtaccctaacttttattccaaatattccaacttttcccc

SEQ ID NO: 39351 - DNA, 201 bp, Bos taurus
tgcatgtagaggagaaatggccctagcaaaactaggttcataggcttcatggaacttttaacttctaaagacgaaaactcctcaatagctccaataaaaaytctgtcaatgtccatcatggcctaggttagtccacgtgtccatccctggaccaagagaatataatattctgattggccacttgaaccacatgggaagaat

SEQ ID NO: 39352 - DNA, 201 bp, Bos taurus
aacatgcttaaaagtgaaagatcatggacagcatttccaatgtcgctggtactctgaattatttccagggtctaaagggaccagaaagtgtgctttgggawccagaatttgtgcatgtttagtattataactttagtagatttcatttttactcaagatataggataaaaaatatattgttttgaaattttgcaaaaaaca

SEQ ID NO: 39353 - DNA, 201 bp, Bos taurus
ccaaatcatcaaaacagctggtggcttctatttggcagctgttttaagaaaaggttttcttttacagagacaatggattttttcatccatgtttggatggmtttgggcctctcttccactgctgaattttgtccagttaaaaaaaccagtgaacaagaacacataattctccatctctctgtaacttctgattctaagtct

SEQ ID NO: 39354 - DNA, 201 bp, Bos taurus
tcctgatttggtggatgtgcagtggagcctgagattctcagtttctaaccagctgctggtgctatgggtctgtggagggccggttggcaagactcctcccytgcctatgtggtcagggtcagggctgccaaccagagagggtggcacattgcattccgttcactctgcactggagtggtcttgaggtccaggtgcggccaa

SEQ ID NO: 39355 - DNA, 201 bp, Bos taurus
aaaacctttacagtagtctacaaggtcctatacaatctggacactgtccccacataccattccagctatctgacctttttctgttattcaactaggccaartactcttacaacttcagcactcgtggttctctctacctctgtattcacaaggctaactcttgccaacttcaggtcttggctcaaaagttaccgtatcagt

SEQ ID NO: 39356 - DNA, 201 bp, Bos taurus
tttgtgaagctcatagtccagaaaagaaatttccagtcttaatagatgctatgggacagggtatgaaagtttaggggaaggcacctactgaaaaaagtcaracctgcaggggagaaagagttgagttggaagacctgacagctttatgaaagccaccacctaaactagttggaagaatggctactagttccaataaaagcc

SEQ ID NO: 39357 - DNA, 201 bp, Bos taurus
caactagatgtctagaccaggcttaaaggcatctctttaattacagccacagagatgttcctcttccctttcatctcatttctggggctctgctctggccyttgccatcatcttctgaaaggttagatgtgccatgtcaccattcagtttgtgcatccaaacagaagccttgcagcatttttctcttgcttaggttggcac

SEQ ID NO: 39358 - DNA, 201 bp, Bos taurus
tgggtattttttcccaggtacacaaaactgggaatgaaaacaatcagttttgtttaaataataactggcaggtaaatcatctccatcgcttaaatggaacygatcaaagggaactaaattaacttccctagaggtcagtttagtaaaaggccacactcttaactccaaatgacacccttttgctctgaaacattaacatga

SEQ ID NO: 39359 - DNA, 201 bp, Bos taurus
tacttctttatcccctaattatgccttcccatcaagtttgaatatctacccttaagacgatttcatgagctagataaaatagaacaagcttcttatacagktcacagtctccacacatcagttagtatacctagcgttctaccacatatatgacaggtgagtttatatatgggatacttatattttataatgtaacagcat

SEQ ID NO: 39360 - DNA, 201 bp, Bos taurus
ctgagattgcaaaagttgttctcgccagtttctcaggccccagggagcatcccaactgttcctgtctctccagcacactcttcaagattagtgggtggatycccttcacacttcattccatgtgcttttcaacctggtgtttttgtgtggaatgagactgtgttcaagccttttaagagcaggttttccattttctgcagt

SEQ ID NO: 39361 - DNA, 201 bp, Bos taurus
tgttatggatttaatataaacagaaatgaagtaactcaccaaataaaaagatctttctgcctctgtaagtacagatctgcatcatcaatttgttgactctmtaaatccctgtgcttgatacataccttgtaattttctgtcttctgtttagagcatcttcattcaagctattcgatatcataagcaaaactttgaaaaata

SEQ ID NO: 39362 - DNA, 201 bp, Bos taurus
attatatgtagtgctctctcatcatacatacctcatgctcaccggtataacacctttatgaatatttctcttaatttcccttctaaagcttgtattttttrtatattacaagccttcagtaaatatttgccaagcaaatgaatagacagtcaaatttaacactagattgaaagtctcttcagattaaaactttcttctgta

SEQ ID NO: 39363 - DNA, 201 bp, Bos taurus
atattttctctgaagatggcctaaaaaaagtcagttacaaccagcattcaccccagcgatgattgcacaagcacaaccatgaaagaaagaaaggccaggcraatcagttgagcagtaagtacttaggcaatctttcctagtgactgttgtcattgccgctggactttagaactgaacatgtttacatttaattagaaagga

SEQ ID NO: 39364 - DNA, 201 bp, Bos taurus
cagaaggcaagcctcattggaagccgtgtcagaagccaccttcctcaaagttttcagaaggttatttttattgggccttagggagctaagataatcacaayggtatgatcactcacctatagccagacatcctggaatgtgaagtcaagtgggccttagaaagcatcactacaaacaaagctagtggaggtgatggaattc

SEQ ID NO: 39365 - DNA, 201 bp, Bos taurus
tatataacaatgaacttattttaatgatttaaatggtgtgttttattaataatagtatgtttttctgtactgtccactgataactgtgttcaagaatgccrtttagatttttataattctgaagaaagaactctagaatatcatctcaatgtattctgctaaaaagaaggctcttacttcccctctttccttctaccaata

SEQ ID NO: 39366 - DNA, 201 bp, Bos taurus
gaaataagattagaaaaaatagattggagagaaattgtggaaagttctaaatgttgtgccaaggaatttgtattgtgtgtgtgtggcaggggggaccttcyaaagggttcaaactgggaaacagtggctggcactttgttttggcatcagaacattggaaatgactaggggcaggtaaagatatgaacggcaagaaaacca

SEQ ID NO: 39367 - DNA, 201 bp, Bos taurus
agaattaacatttttaaggatttttgttcctgtaacagctattaataattaattaactaataaattaactatatgattataattttatttcccatgtaatyctgactctggagaaagataggctggtcttgcatatgtaaatgttctgggttgacgtcattatcttgcaagcttggttaactgtcagttcacctctgagta

SEQ ID NO: 39368 - DNA, 201 bp, Bos taurus
tcctgcgcctgcgcagccaccgctccttggatatggggttggtcctcccggttgccgcccctgacctcggaggcagggtagctcctctgggctgctgcccytgaccttggacaaagacttcaggccatagatataaataggaacacatcaaatatcaagactcccacaaggaagagtatatccaactcaaacaacctagtc

SEQ ID NO: 39369 - DNA, 201 bp, Bos taurus
cctttcctctgtggcttttcttccctaatctacacagagcatatgcaatcagcaaatttaaaatgtagagttattttaatacggtggaagaaaatgtcagygtaagtaagatagagtaggtaggttttaagttcatagtctaacattatttaattagcatggcagggatttaaagaattaaacagcctcttgcagacaatt

SEQ ID NO: 39370 - DNA, 201 bp, Bos taurus
cacagccctgcatcagaatcacccaagaacttatgaaaatgcatattctctaagctctatgttagagaccttgattcattaggtctgggatgaaccttggyatttctaaagtacttaaaagtgtgagaactaccagtttaactgctaagagcatggagtttgccatcagcagctgtagctctgctttcttcattgggtgat

SEQ ID NO: 39371 - DNA, 201 bp, Bos taurus
tgcaaggaaaagttcaacatcgggaaatttattaatgtcatctaccaaatatatcacaattaacagagaaaataatgcagaaaaggcacttgataaaattwaacacttcattgagactaagagaataaatctcaaaaattaaaaattgaagaaaacttccttaatttaataacacctctaaatcaaaccctacagcacatt

SEQ ID NO: 39372 - DNA, 201 bp, Bos taurus
atatatgtgatgaagaactttctccttcatgtttattattataataggttgaaatgaatatggattgtttcttgctgtgtgtgtatggcatgtcatctgaytgcattacagttgtaatattctaatcattataaaaattaactttcattatgcttcttcttttcttcttgtttggtaatgctactaattttataatattca

SEQ ID NO: 39373 - DNA, 201 bp, Bos taurus
aggaagtgttcctgctcctgaactcatggaaaagagaaaccagcatgtgaaggcttaggaaaatgatcacggagacatgcacagaaaaatgaacagtgacracgaactctacatgcaagaaaggggtgatatatgtatggggtatttatcttgtttttgtttctttttgcttacctataggttcaaacctctctgtggtga

SEQ ID NO: 39374 - DNA, 201 bp, Bos taurus
cccctagagtctcctattactgctgttcatggacatttaggatttacactctttgggaaatagacaattcatacattttaacactcaaatcaaccttgagygcccttctatccttcttcaagtaataaagacacgatgatcaattttgcacattttctcactggcatcttacatggtctgtgaaagtttaatagggttcta

SEQ ID NO: 39375 - DNA, 201 bp, Bos taurus
caagacttaagcagctgacctcatgcctccctctgctccgggttctattggagaggaaattgtagcactgggagaggggaaaaggaggagctactaaacgyaccagtaacataacagacaaatccaagaggaaggcatgattcaaagggaaaagtgaagatctgaagtgggccgacagagcagtcggttgtccacactgcc

SEQ ID NO: 39376 - DNA, 201 bp, Bos taurus
gtttatttatcaataacatactgtacctctctggacacactgacagacaactgatttttttttctacaatctcccctgggctctaaattttagaagacacrcatgaggaggaggaatcatgcctgaatctccttcccaaatatatctaaactacctgcccacggtgaaagctggagaagcagtacttgcacccttcaaagt

SEQ ID NO: 39377 - DNA, 201 bp, Bos taurus
ggctgaagcagctggaaacatggaaggtatagctcagtgcacagttctagattgtcttctcccagaaatgattcctctgggctacaactcaggcctaacaytaggtctgccctgtcatgtgtcatgtgtcctgtcaagttaattaaagcctccctacagtatattctctatcatcctcctttcctctatcatcatcttttt

SEQ ID NO: 39378 - DNA, 201 bp, Bos taurus
caagttttaggcaataatatttatttggtgaaatgcaatgaatttcttaagtggaatagtctaaaattttaagtatagttcacactccttttatagatggyactttggacccatctgttttaattacagtcagagggaaaagtctttaaaatatgttaaaattttacataatttaaaattttttaatcataataacttgct

SEQ ID NO: 39379 - DNA, 201 bp, Bos taurus
cacttgtatttgtcctcagtaattttttaaaaatcttttttaaataagttatacatcatacattacaaaattcagaaagcacaaatgggtacacagtaacmtatgtgttggaagtgagagttggactataaagaaagctgagtgcagaagaattgatgcttttgaactgtggtgttggagaagactcgagagtcccttgga

SEQ ID NO: 39380 - DNA, 201 bp, Bos taurus
ttgtcaaattagatttttcttctcattacaaaatgaaaacatcttccaattgcttgagaaaaagaaagcctgtacgattcctttaggcacatgtaagtctraagttggaagcctaaggagtttcatcttactgtgctcatttaaaaataagtaaaagcttagtaaagttatatctgactacatattaacattctaggtctt

SEQ ID NO: 39381 - DNA, 201 bp, Bos taurus
atgtgggactctttggtttgtaaactctttcctattttacctaagttttaaagtgtgcagatttatcatcagtaattaaagggggtaagactattctttgytgaatatggccagctttttgaattctgggagcaaattttgcatctttcctgaattttctcccatgaccaagaagtctaataacatttgtgttaatgatat

SEQ ID NO: 39382 - DNA, 201 bp, Bos taurus
aaatttctatagtaaaactctaagccccagtacctcagagtgtgaccagatttggagatgaggcctttaaaaacgtgatagaattaaaaagaggccattgraatgagacctaattacttaatctgactggtatccttataagaagaggaaattcaggcgcacagagggaggccaggcactcagggccgtgtgtgcacagag

SEQ ID NO: 39383 - DNA, 201 bp, Bos taurus
atcagtgtaaagggactggattatgaaaccagttataaatctattaaataatgagagaaaactaggaaagtcgtatgtgcccagcatgaagcagagacaaytgtcaatgatttatacctactagtacataatttagctacaatatacccagcaatttaatactgacatgtatgttataatgtgccagaattgtacaagtag

SEQ ID NO: 39384 - DNA, 201 bp, Bos taurus
ggagaaggtgaaccaccacacagatcctacaaatcctaggccaacctgggtggaggggggagctatggatctactgctgactcctcagagtgtcccacatygagtgaagtgtgcaggcctttacacacctgtcttgcttagtcactgtatgccagctgttcaggcccagatatgaactcaagggaaagactctgcagctga

SEQ ID NO: 39385 - DNA, 201 bp, Bos taurus
aaaaccccaaggtctgtagtttgtaaaccaaaaaagccaatggtgtaatgcaatctcagtcccaaaatccaggaaccagaggagccaatggtgatagtacmaatctgagtagaaaggcctgagaattgagggtcattggtattaaggtcctatccaaagacataatacccagtggtgttgatgttggagggcaggagaaga

SEQ ID NO: 39386 - DNA, 201 bp, Bos taurus
tttcatgtttctacatgaagaaatgatctagaaaatccaaattataacctcaaaaatataccctaaacaataatatcctagaaaacaacttctgggccatsaggatttagccttaacttttcagatgaatcttgttaagctttttctaaaatagcattgtgatttttgaaaattctaacaagtaatcgtttggcctatgtc

SEQ ID NO: 39387 - DNA, 201 bp, Bos taurus
tgtgttagtttgtaaattgagttagctatgatggtggattggcagtatccctctgcctccataagtgaatcctaaagataaagatatttctccataaagamatccataaaagaaaactctggtacaaagaggaacacaggcaggatggaacaaaactaatatttctatttaaaaaccattaaacagaaccacagcataatt

SEQ ID NO: 39388 - DNA, 201 bp, Bos taurus
ttcttttctcttgacaaacatcaattgttgataggctagttgaagtcccatttattgatttctgctctgctgtgggagaattctattgaattagaaaatakcacagagtcattgaaactactacagtcacagatgcagactttgagtaaaataaagtgtgcatttgtcagtctttctttgtttactttcttgagtcccatt

SEQ ID NO: 39389 - DNA, 201 bp, Bos taurus
ttgtagcaggcagatgtttaatcttaacatagtgtgtgttagaggaagtcatctagaagatacaaccacccacagacccaggatctggaccaaacccatcrgaggttcttcatccctcatatatgttggaatttacattctctctactggtcccacagtgggagtcattttcaaggatgaagccctgagagagtgatatgt

SEQ ID NO: 39390 - DNA, 201 bp, Bos taurus
atgcttaattgcagcccagaagggactgctcacgtttcatagagagctgtcctatggacccaccagctacaaggtaagagccaggtggaaggacaggagtytgggaaatagttcttgaaaagtagctgtttcctagcaataatactctacttgccaaaagaagggaaatttactacttaagtttctaattgtctctgccac

SEQ ID NO: 39391 - DNA, 201 bp, Bos taurus
ttcttggtatttgataaatgattcctgcaacagcaggcctatcatttctgcagctgtcagcacaaccaagcagcaatgtccctgtgaagagactgtgaccygtgggctctgagtcttctcacggcctttcacactgtcggcgccacttcaccttgtgaatgaaacgaggtagagagctggcagagattccttgtgctcgta

SEQ ID NO: 39392 - DNA, 201 bp, Bos taurus
atctatcagatctaggcccttaaatctatttctcacttcaaaggcttactacttcttctccctggtgaagagctgtttccattctggttaccagaaaacartggtgtatttttcactgattggcctgcatttttaaagctgacaattttgcttaatatcatgtgagccatttagcattctaacacttgagatgataataaa

SEQ ID NO: 39393 - DNA, 201 bp, Bos taurus
tttgcattctcacctctgaaaatgaatcagatttatacttgcttgctaagttgttaaactctgcatgcctcagggaaacccaattaaaagtcttggctgtygcaaaataatttctctttatttagccttccaagtttcccagtattttgaacttggaagaatgtagtcaaggaacaattataattcttcaatttattttag

SEQ ID NO: 39394 - DNA, 201 bp, Bos taurus
aggaaagcccacatctcataagagggcttctgggaaacttaagccctcccttctggaaagagatattatttttcacttttctatagattataaagaaatcktcagagaaggggggaagggaaagttctttatctttactagccttgaatatctctaagaatggagttgttctctttctggtaagcctgagcaaactgactg

SEQ ID NO: 39395 - DNA, 201 bp, Bos taurus
taggttatggatgtttttctccagccttttgagataatttacatataacattgttcattgtttaaggtgcacaatatgttgatttgatggacatagagggmaaaatgactactaccatagcatttattaatacctgcatcaaaattcataattaccattttctttttttgtgtgtgagaatatttaagatctactctgtag

SEQ ID NO: 39396 - DNA, 201 bp, Bos taurus
agacaaactgctaggtaattagcctataggagtgagaaggatatcagcactgtgagggaatgatgagccagaaggtttgggctaagagaaaacacaggttrgtgctaaaaagtattggtaagccatgttaaagattgggaattttatcttaaatgaaagaaaattctttgaagtattttaagacttgaaatcccagaacta

SEQ ID NO: 39397 - DNA, 201 bp, Bos taurus
tgtggcagatctctcccggaacacagatgtgctccaagctgttcccttgaagaagcaaactgctgtgtactcctccccagggtctgtctgcctgagacatsagtttctgtggtatctcccagtgtgaacacgcactagtgagctgggatgcccccgtcatgtgatctttgagaattagctctggccagcctctgttatgag

SEQ ID NO: 39398 - DNA, 201 bp, Bos taurus
ttttgatgcaatccatatcaaaataccaagtgcattttttaccaaactagaacaaataattctaaaatttgtatggttacacaagacttcaaatagctaarataatattgagaaagagaacacagctgaaggtaacatgctcctagatatcagactaaagctatactcatcaaaacagaggcacagaaagagacacagatc

SEQ ID NO: 39399 - DNA, 201 bp, Bos taurus
aaaattacaaaaagaattaagccataaagaggaaaagaaaaaaatgataaacattggatttggacccacaaaggaaccatgtagggatttttaaatgccaratataaataatcatatgaaatgtttgaatacataaaagatgaaaccatgaaaattagcaatcaacatgagatgtcaaaatgatcatgtagacttatagaa

SEQ ID NO: 39400 - DNA, 201 bp, Bos taurus
tttaaagtgtacaattcagtggtgtatggtatatccacaggttgtgtaacaatctccacatctaatcccagatcatttcatcacctctgaaaggccctccrtgcctgctagctgtcacttcccattctcccacccctccagccctcggcaactgcgaaatgactctctgtctctataaatttccctgttctgggcatttca

SEQ ID NO: 39401 - DNA, 201 bp, Bos taurus
gagagaaagcagtttaaaagttgatcaagttcggccaagtcacccttgctaagcttctgtttcctcagctgtaaaatgatacatatctgatagattgtttyaagaagtgatgagcaggccagtagctctgactttcattttgactctaggataattcttagattgtatctcctggcacatacaacagtgacttacatacat

SEQ ID NO: 39402 - DNA, 201 bp, Bos taurus
gactccaggaggctcacaggtgggggcgctgccggccccagagtgagctcacctcctcatgcttgtgtgggcgacttgggcctcgcacagcccccacaggrctcctgacaagctctgtgtaacttgcttgctcccggtaactgcaagctccttactccctgccttcttcccctcaggcccatccacacactcatggtccac

SEQ ID NO: 39403 - DNA, 201 bp, Bos taurus
cttggcttgagctgtgccctggcctagaacacccttcctccccacccttctgctagtcaaaccccgactcttcctttaggctcagccacttttcctcctcyacctgcagtccttatggcccagaagtgctcagcggtgatagttacctatttatttttctgtctctccattggagacagacacaatggtaatgatgtgttt

SEQ ID NO: 39404 - DNA, 201 bp, Bos taurus
aatggggatcgatgggccagggggtgggactggggggtgggctgctgtcttaaacaagagggtcagggaagacctcctggagagggtgcctccttgaagtrgatgcaggagtgaggcctgggctggctgcaggaagagcgtccctgggtgtgacggtggccatcagggagagtagaggcctggcaggcttcagacaagaca

SEQ ID NO: 39405 - DNA, 201 bp, Bos taurus
tgctccccaaaatcaaaggcacagtgggtgcatggtgttctgtaaatgggaacgtgtggctgggacagatggaccaggccattccagggaagagccctccrcgtaccaggaacattgctgcacattcattctctctctcaccagcacccattttccagatgaaaaaactgaggctgctcaagattctaaatccgtggggcc

SEQ ID NO: 39406 - DNA, 201 bp, Bos taurus
tctggccttccaaccacgtgacagaccagaagtcagaagagccaagttccaagaactcgcaatacagaacttcctcgaggtgatctgaaactctaaaatcytagtggtctcgggccgccatgcaactatggaatttcagaaccacaagggcccaccctcttccggacagatgaacgctcaggaggcccacagcaggaaagc

SEQ ID NO: 39407 - DNA, 201 bp, Bos taurus
gatcccctggaggagggcatggcaacccactccagtattcttggagaattccatggacagaggagtctggctggctacagtccatagggttgcaaagtgtsggccacgactgaagcaacttccactttatgttacgtaatctaaccttcaacaccaatcaatgctcaagctttaatggtatacactctgtgaggttcagaa

SEQ ID NO: 39408 - DNA, 201 bp, Bos taurus
acctcatctctcagtatttatgattgtgcatagtcctcctcccttaaatctgggcgaggctggtgattggctctagccaatagaatgtagatggtgttacrctagtactaggcccaagcgtggcagtttcctcttgcatttttaggagacctgagctgccgtgtaagaggtccaactaacccgtaaggaagccacatagag

SEQ ID NO: 39409 - DNA, 201 bp, Bos taurus
cgttctcagctgcaagaactcctgccttggccccaggcatcgcctccagccccagctctgcccacccagcaaagcctcccaggggatcccgcaaataatgyttggccagcagccgctcctgctcaaatccgtatcgaagcctaggataataaataaagccactatcggccagcacatatttacatttttccggcgggaagt

SEQ ID NO: 39410 - DNA, 201 bp, Bos taurus
ctggcactctggggtggcagtgcagggcgtcaagagcccagggggtttgggcagctgtgagccagaggctaggtaagggagaggggaaaaaaggcaaggartgtggatgaagcgtgtgcttgtgtgcttagacagtgcctgccaacattgtagacacgcagtaaatttttgttgaatgaatgaatgactaacgggtcagga

SEQ ID NO: 39411 - DNA, 201 bp, Bos taurus
ttatagcacctttattattagcagatttgtcttacagatgaggaaattaaagccccagaagtttcaggtgactcagagggtcccgtagctgaggccacacygagtgtcagaccacatctggctccagaagcctgagctcttaatcactttgctatcctgtctccttcccctggtgtttggcctcttgggttctctactgca

SEQ ID NO: 39412 - DNA, 201 bp, Bos taurus
atctttagtgtggatctaatcctggggacacaaatccttgtgtgggtcagtctgcaggaaactgatgtggagacctcaaagatggcaatgagaaggaaagytgacctaactctagaacaaaggagatgaagatggtgtgtctaccagatgccatggttggatcctgaatgggaaaaagtatatatttacaaaacatgtttc

SEQ ID NO: 39413 - DNA, 201 bp, Bos taurus
taatacttttttctttttaggggaatactagatgccacccacttaattgatttcacaatcccatccactaatgggcctcatccaacagttgaaaaaaagcygtagaacaggtcaaatggggcattttctcttagtaaacaattgtgggccttgaggcctgctagctgagtggggccagatcagatgtccaaaccagatgtg

SEQ ID NO: 39414 - DNA, 201 bp, Bos taurus
agggcccgagagggcctcggttactcaaatcctcccttggctgttagagaaagcaagtttcagagacttaaaggctttggtctctgggcgcattgggggtrgaaccaggagctcaggcctggtcagtaccgtaggggtttgggctttgcctggagtgggaacagacatttgccccgctctgtgctcccgtccttgtatggt

SEQ ID NO: 39415 - DNA, 201 bp, Bos taurus
ctgcaaatctttaaaaaggtgtctatatattctttttcaacatattttttcccaaggtttaaatacacttgttacaaggggccctactgagcagtcttatraactaatatgtgtggtcctgggatatcagccatggagagaggtcatgaaggtcagatgcagaaggtcactgtaactgaaggccaagttctaggggaggtc

SEQ ID NO: 39416 - DNA, 201 bp, Bos taurus
gagaacagagatgggtgagggttgtgatgaatcgcagtgtactctggtcttgctctatacaggggagagagccaggagcccacaggccaagggagagacayggtccacctccacggtagccattacttcaaaagtaaatgtgaggacaaaccaagaagcccgtgaagaggcccatctgtggccttcccccagctcttgctt

SEQ ID NO: 39417 - DNA, 201 bp, Bos taurus
ggagacacagaggacctggagggtgcagggcaggagtgaaagagggaaaagtattccgtgtatgagaagcgggtcatggccggaggcaggaacgaggatgragggagagcgcgggggagactgacagacaggcacagggctctgaaccaaagcagatggccgggtcctccctgtgtctggatgcagctgctgtgtctccag

SEQ ID NO: 39418 - DNA, 201 bp, Bos taurus
tgcagaagtgactggagtccgcccctggctgccccactgcgctctgccccgggcctccaaccccagaggtcaggggctatggctggtgcgctggccccgcyggctttgcctgggcacttgtgaactccctcagctgctgcctggtgcataaactttcccattgtcgaggcaagctcttctatcctgtgccgggggctcaac

SEQ ID NO: 39419 - DNA, 201 bp, Bos taurus
ccatttgggagtctcttaaaacgtctgcgggaatttcagaaactgatctttataaggaaggtggcagaatgtattggaaagagtgtaaaggcctctgtcaractccctgggcttgaatctcaagtcttccaaattcctggctgccagaccttaggaatgtaacctaacttgtgaacttgcttttccttctccataaagcag

SEQ ID NO: 39420 - DNA, 201 bp, Bos taurus
ctacagtcggtgaaattctccaggccagaatactggagtgggtagctgttcccttccccaggggatctccccaacccagtgatcgaacccaggtctcctayattgcaggagggttcggtaggcccagatggtcacgagaccagccattctctcatccatctctctcctactctgtgtctccctgtgtatctgcttccttta

SEQ ID NO: 39421 - DNA, 201 bp, Bos taurus
catggccaagagtatcttttaagacatcatcattatgccattattatttttttttccttttgtgtgtttcataaatatttatgggatctcctggacacagrggaggggatatttaaaaaggattcctggctcaggaggtaaacatgttccaataattctgtagcctcagtggcctatagagagatgtcctggagggtattg

SEQ ID NO: 39422 - DNA, 201 bp, Bos taurus
gggccagcagagggcccagatgtttccgttacagaactttttagagttcacaggctggagaatctgggcttcccaactattactgccaagctcagcctagktggaggcaaaagccagagccttggccccgggtcctggggcccaggtaggggtccatgttcaggcttccctggaaagcagagtgtgtcaaagtctcagagg

SEQ ID NO: 39423 - DNA, 201 bp, Bos taurus
ggatggtctgctggagagtagaggaccaaggatgggtatgatagagagtaggggacgaaggacggtatgctaagacagtggaggactaatgatgagtaacrtagagagtggaggaccaaggatgggaatgctggggagtggaggatgaaggatggaaacgctggagagtgggggatgaaggatgggaatgttggagagtcg

SEQ ID NO: 39424 - DNA, 201 bp, Bos taurus
tgcaagtgactggcccgaggtttatacttgggtggggagtttgtactgaacccagcagaattctagcccaaagtctccctaccatgtcacactgtcacccyaagctgaggccactgacctatcctctcagcgttagacaatgcccaggagacagagccaactcattggaaaagaccctgatgctaggaaagattgaaggca

SEQ ID NO: 39425 - DNA, 201 bp, Bos taurus
acaatataaaatattttctggtaaaagctttgctatactcactgcatatcattaacattaattaaaactaattttacctgtttccctttccttttttattmtggcttccaaaagttataaaactcatacatacttttcattatctttctactgggctgtgctgttcttttgctaattgtgttttataagaatcagttctag

SEQ ID NO: 39426 - DNA, 201 bp, Bos taurus
cacagtgaaatgaagggacaactgtcatttgtgacagtactctgagcactcgtaatccaggccaggctaaaaacaatgagtatcacacaaaactccagacrccatgaacatccggacaaagaaactctgattcaaagacattttcagctgaacatgacttgaaaaaatcaaaatgcctttctactttagagaagcacccat

SEQ ID NO: 39427 - DNA, 201 bp, Bos taurus
cagaagcctgagcaccgcaactagagaaagcctgcgtgcagcaatgaggactcagtgcagtcaactaaataaatgaataaaaaataaaacaaaacaaaacrccaatggtgccgaagctgttaacactgcacggtgaatcgaggcgagaggactgacttgcacacatcagacaaggcaacgtggagcgctttggcaaagatc

SEQ ID NO: 39428 - DNA, 201 bp, Bos taurus
ctggactgagagatgctcttgccttgaccccaacccctgcataaaccgggcccgcattctgcccggaaatcagggttcatccctcagtcagccttggccaygtggcatctttctccttataacctcttcagacacaccccttaatctcagaaaaagaagcttgcaaaccacacaatgcttcataggccaaaatagagattt

SEQ ID NO: 39429 - DNA, 201 bp, Bos taurus
cactcattaccagtgggttggccaaagggctatatccaccaggtccgctgttcggaatctgaagattcttaagaggaatctgcaaccatctggggctcctycaggccctacaggagatttctggtctcactctccccgcctttagagatactgggatgaggctcagagaggcggagaggcttgcccagggctgcacagccc

SEQ ID NO: 39430 - DNA, 201 bp, Bos taurus
cccagggcacgggcctttgtgagccctgggccttcccttcattttcctcagtcccgacgagttctgggctgaaccagctcagctgtcccatctgaggggcrgaatagggccagagccacagtctatagacataggagatggatttttgctcggttaagagaatcattcaagataaaaaccagtgactcagtgtcttgcttc

SEQ ID NO: 39431 - DNA, 201 bp, Bos taurus
agtgcctttggtgagtggccttgtgttcttggcagagtcccatgagcacacctcaagcagtggaaagtttcacccgcagtgggagttgggcccccttcccyccctctctcctgggcgtgctgtgcaaacccacagcacccagggagcatttgctgcctggctgaagagcagagatccctactgaggccagaccctggcatg

SEQ ID NO: 39432 - DNA, 201 bp, Bos taurus
tccagaaaaaagtaagatgcatttctcatcctaccaagtgtaggaagaggctgagggtggtcagagcatcggtgagatgcagcatgccttgtgcagtaccrgggagagtagttggcccagcttctcagcaaaggaggaagagttatttctgctggcagatgctggtggcttcaacaggtgcctggctttctgatcccaatc

SEQ ID NO: 39433 - DNA, 201 bp, Bos taurus
tctttccaatcgcaggttagtctggtgaggaagataaagacgtttgccaccaagatggtaatcacgagtggaaatgatgaagacagaggaggccaggaaaragagagtaaagaagagagtgtcttggcgatgctggggattattgggaccattctgaacctgatcgtcatcatatttgtatacatctacaccactctgtga

SEQ ID NO: 39434 - DNA, 201 bp, Bos taurus
agatccctccagcctcctacactccaccccagcatcacaggcgagctttttgctctgaactctctgccagtgacatttaagagaaatagaacacaacccamaaacaacttaacatttaaaaggccacaatgcaagcaacttaaatatttctagtagcacacacacagtccacaagaaacaggtgaaattgattttaataat

SEQ ID NO: 39435 - DNA, 201 bp, Bos taurus
gacctctctccagtggggagttcttgccacctgcggggcattcaatctcgactaaatgcttccacagcacagagtgttcaatcttaacagctcggtggtayggcctggggagaaggggacggctcagagcagtgatgggatgtgcctaagctccccactccagggcccggccaccagctagagagcagccccaacatttgc

SEQ ID NO: 39436 - DNA, 201 bp, Bos taurus
gaaggggtccttccttccaggaagtcttctacacccttcccagagggctaggtctctcctcggtgccccagcaatggcctttggccccttagtgacagcaycagtcatgctgtgttggagccgtctgtgtgtctgtctctcatgcagtccatgagcctctcaaaggcagggcctcgcctcagccatctgtctatctccagc

SEQ ID NO: 39437 - DNA, 201 bp, Bos taurus
gcagtcaccatctgcagtgattttggagaccctaaaaataaagtcagccactgtttccactgtttccccatctatttgccatttccaggttctcaggcccmaaatctaggcatcatgcaatccctcctttctcatgacacatacacaattggaaaatcatggtggtcctacccttggaatatttctcaagcctggcctcag

SEQ ID NO: 39438 - DNA, 201 bp, Bos taurus
ttaattttggataagccctggactcagatgcttttgtccagttatttatcttagagcaatgtgatgtgattggaaggcttctgattagactgtattttttkaaatccttggactttcctggaggtccagtggttaagactgtgtgcttccatggcacggggcactggttcaatccctgatcagggaactaagatcccatat

SEQ ID NO: 39439 - DNA, 201 bp, Bos taurus
ctctctgtgttcagcatcttttacttctgtagccccctttgcttgccatgttcctgtttctggatgatggttccaagactcttggccctgggtgagtgacrtcattctctaaatcagaacatcttccacaggaatactgtgcagagcacatccccccacgagctggggtctctgcccctagcactaagggggcctgacctt

SEQ ID NO: 39440 - DNA, 201 bp, Bos taurus
gtttctagggattgtgttcttgcttggacttcactgttctcaatgggatattgttctgcaactggaccctttaggctttgtgtctgacacacaatgaatakccttcaaatactcttttttaaaaaaaaaaaaaaacaaaaaacctctctaatcaagaaataaaactttctagatgtttccctttcaccaaattcctgactg

SEQ ID NO: 39441 - DNA, 201 bp, Bos taurus
ggaacaaagcctgagacgcgccgggcagagtagccccaaaacagaaggcagggtgattcactgggagtcaaggtccccctgtgattgtgtgggtacactcrgtaatgatgataaagcactcagaaagtaatgatgtacttaaatggacatgtgaagtgcttttaattttttttttttttgacaaagaggaaactcaagtgg

SEQ ID NO: 39442 - DNA, 201 bp, Bos taurus
ggatcatcttcctaaagcatgatctctaacttcataacacttccttttgtcctgtaaggcaccattcacaggtcccaggaattaggacctgatctctttgrgggcctctattcagatggccacagtggcttataaaaaatttgctgttttatcgaatgttaaatcttgttagccagtcttagaagcgcctttgtcaaatgc

SEQ ID NO: 39443 - DNA, 201 bp, Bos taurus
tccaagtcacccagcgtgtcagagatgggccagcaccttggtttctggagtatcaaatgaggattgatttactgggtcggggggcctgaagactttttttkgtaaagatccagaaagcagaaacaagaagcttggcactagggtctcattaagacctccatgagccctgggcactctggcctcctgggtcttctccataag

SEQ ID NO: 39444 - DNA, 201 bp, Bos taurus
agggagggctggggagacgcccaaagggcaggctgaagacagagcaggctttcatcaagtgaaagggaagaaacggcaatgcccaggtgaagggactggartgtggaaaagctaaaagggaacgggagagcatgaagatggctcttgtgatgagtggtgaaactgaatttctaattttttaatattgttttgaagaagaat

SEQ ID NO: 39445 - DNA, 201 bp, Bos taurus
ccaagccctctggacaccttgatgcaaatacagacgggagagtgcaaaagattttcttctttcttcttcaactccttccttggagttgtccaaggaaggcyggacaactcatgttttattgctaaaccaaagttgctatcttggggtttggggattttttgtggttttgttttgctttgacatctagtgacagaaaatgag

SEQ ID NO: 39446 - DNA, 201 bp, Bos taurus
tcactgacagttgctatctaagggagttatctttgtttttggtctcatccaaacattttcccttttttcatccacgagcagctgatcctcttcactgttgyacctttttgttttactttttatagactgtacatcagtctgtacttctacagctattttttcttgcataagttccttattaccaagagcagaatgtcttca

SEQ ID NO: 39447 - DNA, 201 bp, Bos taurus
ttaactcatcttccttctcaggtctgtgtaaaaaggagagtaacatcaatctagacatgaaacgtgagctctgttcccaatgtcactggccgatcatgagygtctcatgactagactgtcccaagtcagcctgtactttcctaagaatcctcgtagaagggccaggcgtattctaatctggatatctcttaactatctcaa

SEQ ID NO: 39448 - DNA, 201 bp, Bos taurus
atgagctgatcacactcttttaactaatactatacagctcctcactaacccctctagggtaggacacacagctttggcccactatagcctgctttgcctgrcaaagcaataaagctattcttttctacttcaccgcaaactctgtatacagagctcatttggagtcgggttactgaggccagattcagcatcaatatggct

SEQ ID NO: 39449 - DNA, 201 bp, Bos taurus
agaaatcatcattttgacacataaatcagcataaaatatcaatgagatagtttacgtatcttttttattccccactaaatcttgtggtattttacactcamggcacatctcagtttgatctacctgcatagtttgatctactgggaagtgcttaacagtgacacatgctaccgcctactgccacgcacagtttcagtctgg

SEQ ID NO: 39450 - DNA, 201 bp, Bos taurus
cactgaaagcctcacaggccaacagctaatggctgaggaacctggtcaaggctattcacctccattaccagacacctccaccctttccaaagcccctgctytcctttcttctggccttccttggcctgctcagtgtggattagacccggggtggctccttcctgctctcccatgaccttaggtcttattatattagaccca

SEQ ID NO: 39451 - DNA, 201 bp, Bos taurus
gctcagttggtaaagaatctacctgtaaagcacgagaccctggttcaatttctgggtagggaagatctgctagagaaaagaaaaagctaccatctggcctmgagtactagtcccttggactgcaaggagatcaaaccagtccatcctaaaggaaatcagtcctgaatattcattggaaggactaatgctgaagctaaaact

SEQ ID NO: 39452 - DNA, 201 bp, Bos taurus
tgcatatatatatatatatatatatatatatatatatatatcatacatatgatatatacatatctctcagattcttaaatatatacatacaaaatgtgtgygtgtgtgtaactgaaccactgcacacctgaaattaatacagcactgtaaatcaagtacacttcaaataagaaaacaattttttttttaatttctgctaaa

SEQ ID NO: 39453 - DNA, 201 bp, Bos taurus
tctaaaaatatctttgccatccttgcccttaaagtatagtttggctgggtatagaatcataggttcacaattaatctctttcaacttcaaaaatatttttygatttccttctggcgtatgttgttgttcatgacaagttggctaacaatctgatttgtgctctgatttgttgagagaaatttatgcttcattctctggtga

SEQ ID NO: 39454 - DNA, 201 bp, Bos taurus
atccggggctcctagggagctctgtgcctcgaaaaggggaaatgccaccctggacaggcagagggagagcaagcagccaatgtgttagcatcctctccccycagcccaccaccaaaaaaaaaaaaaatccatcagtgacggacacctccctccagaacagggctcagccaccgatgagtgccaggatgtcaggggctgccc

SEQ ID NO: 39455 - DNA, 201 bp, Bos taurus
tcaagcttgcaaactgagagatatggtgtctttgacatgagcatattttagctcatgaataaaaggttttactgaatttaaatgtgcttaacattgggctyccctggtggcgcaatggtgaagaatccgcttgctgatgcaggagacacaggtttgatccctagtctgggaagatcccgcatgccatgaggcaactaagcc

SEQ ID NO: 39456 - DNA, 201 bp, Bos taurus
aggcccacagcagcacagcggaccgggagcggcatcctttcccaggaagaaaaggtgtctgccagcagagggcctgcagaaccttccgaggcgcctctccyctctgtgttctgcttgggcaactggttggtttggcctagaagcaagatggcaatcataatcagaaagggaagctagattttttaaataacttaaaaaaat

SEQ ID NO: 39457 - DNA, 201 bp, Bos taurus
ctgcaaggcatggtcctacatgggacatgctcagtatatctttaatccaattttctgctgatgggtgtggctgtgttccctcccggtagtttggcctgagktcaaactgtggtagcagtaattggaaaactgctaatggaaacctccttcaaaaggacttaggccagcaccctgcagttcccaggactgttgtattcagtg

SEQ ID NO: 39458 - DNA, 201 bp, Bos taurus
aagcaaattcaagcagttttcttattcgagttcaaaatgggtcacagagtagtggagacaactcacagcatcaacactgtatctggcccgggaactgaacrgcgcaacggggcttcaggaagctttgcagaggagacgagagccttgaggatgagggctcagtgactggccgtcggcagctgacagtaaccagttgagagg

SEQ ID NO: 39459 - DNA, 201 bp, Bos taurus
ccatttttatagatgagtaagtctcaggagaaaaaaaagtttaactttggaacagtgtcttcctcgaccaggccttcttaatcatttaatgaagcaagcaygtcttctcagaagcatctggcccgtttcagtcctcccgaatccccgtctcccagagtgccctgttacacaggccaccgatgtggcagagacctgctctca

SEQ ID NO: 39460 - DNA, 201 bp, Bos taurus
catctctgtactccagggtctcagtgtttgggctgtggggtgagggcagaagcggagccaccgcggtaatgtcgggctaactctgtgaccttggtagtacygctgccactctgagtgccacgggctctgtacacacacgggttcactgcaccctgaaagcggtgccgtggaaaagcagcagccccatgacccccaggagga

SEQ ID NO: 39461 - DNA, 201 bp, Bos taurus
ccggccggtgagggcgtcctgaagtgctggctcccaccagggcggctgcctgggagacgcagcgcccttggctctgggttctgggcaccatccgtttttgyggtgttgcaggccggtggcttatttgccctaatgaggttttgattactctccatttgtctctttcatcagctttatgttaaaaagcctttttatttggat

SEQ ID NO: 39462 - DNA, 201 bp, Bos taurus
cctgtgtccatctatggccccacaccgccagagtgggagctccccaggacagggctttctgtccacctcattccccgctgtgtcctcggaccctgaagcaragcctggcaaccagaagggccctgtaagcattcactgaatgaatggaaaacagagtgaatgtgttttacagatgagcctgtggaggggccgagggagaca

SEQ ID NO: 39463 - DNA, 201 bp, Bos taurus
gaaagccagggtggctagagcacaggaatgtgggggttggggcagagcctcagaggcggcaaggaccagtctaagtggggccttggaggccttctcgggtrtttggtctcctctctaacttcacttgaaaagcactgggattctgcaggggttgggcaagggaaaagaggcccaggcatcttccccaaagaccctctcctc

SEQ ID NO: 39464 - DNA, 201 bp, Bos taurus
ccttttcactggcgggggcgcagaggctcagggcgggcccaccggcccatgccgctctgggcaccagcctctgtcattgccaggcgccgctctgcctgcarcggagatggattcgcaggcctgggtcctgggctggcccatctggagtagagatccctcatcctttgtaaacgtgctctctgaaggagctgaaaaggttac

SEQ ID NO: 39465 - DNA, 201 bp, Bos taurus
gattaaagtttgtgacaatcctgcattgtcagataatggttagcatatctaaaaaagcaataaagaaatttaaaaatacagcacttacattgttttttagmtacaatgtattgcacacccttagattatagtgtgtgtaaatgacttttacatgcactgggaaaccaaaaaataaagtgcgactcattttattgcaatatt

SEQ ID NO: 39466 - DNA, 201 bp, Bos taurus
agcgagtggacttgactctgaagtctaaactcagagcccaaactctcatccactggcaagactactggtctacccaagagctgggcccaaacactagcaaygggcactgtgattataggatctcagccctttcatttgggcttccctgggggctcagtggtaaagaacctgcctgcaatgcaggagacacaggcgagatgg

SEQ ID NO: 39467 - DNA, 201 bp, Bos taurus
gtcccgttggcctccatggtggtctttggggtttaattaaatatgtcagattaggtcagatagtgaatctgccttcagaaatggggcaactcaattccacragccaaggagtagaatgggccccatattctccttgggcttccctcatggttcaccccaggggtagccaggtctcagaagtcatcatggccattcgggaag

SEQ ID NO: 39468 - DNA, 201 bp, Bos taurus
aattcggctgtgggatgcggaacagatactgcctgatgtcttccttgagcccctggcacaggtgggcctggaggacttcgtccggccagcccaaggtgggyaccaggctctggaactcgttgatgtattcgatggcggcgcggtccccctgcctgaggttgaacatggcatcttctgctacccgcagggcctggcggtact

SEQ ID NO: 39469 - DNA, 201 bp, Bos taurus
gggtcatcttgcttttatttcatcagcattgatgacatgatgatttatatgatccaaatgaatgaatgaaagacctacagctgggccttagggacccagcratgaacttgggtagaggacgaggggtgggcaagtaacccagagtgtctggaagcctgagggccatgacagcacctcccctgtagtctacttttctctctt

SEQ ID NO: 39470 - DNA, 201 bp, Bos taurus
gacgagcgggagtcacccctgcttagggtaagtgtgtctcgggtgagcatgcaatgaacgtgctcgcatgtcactcggcccactacccaagattgttccaycacttccttacaggcagctaccttggcaggacaggcaatggatttctcacaagtgttcacttatggtacttgaagagaggctggccgtgatgaattcgat

SEQ ID NO: 39471 - DNA, 201 bp, Bos taurus
tttctgcttctgtggaggaagaagaaagctgtaaagaatgttgtttccaccctaataatgagaaaaacccagaaaagactccaaagactcacccccatggrccacaaacccaccggtcatgtcacctgaatgacaaagaaggacgatcccctccggaccggctcacgtgggcctcacgtggcaggaagtagcggctaggta

SEQ ID NO: 39472 - DNA, 201 bp, Bos taurus
ccagagcctctctcccaccatgagatgagtcactccgtgtccagggtgggcaggggccgaacagactcccgaactggccatgaaaagcaccctgaagatcyggttgcttgagatcaaagtcaggtcagtaattacaagaacggaagcatggtttgttccagccccttccctgggcctcaccatctgtcgcagactcaccag

SEQ ID NO: 39473 - DNA, 201 bp, Bos taurus
ctccaaaccgcttagttcagctttcaaggcccgacatgatcaagccccatctagtccatggtacatttgctgccacgtctccaggatcccacacagatcartcctgtttccctatacaaaccacggcctctatgtgctgctacgttcagctgagacccagtgtaacttctctgctttccagagaactcaggagctcatccc

SEQ ID NO: 39474 - DNA, 201 bp, Bos taurus
ggaggttgggggactgcttagggacaaaggaagaccgcttaggaggcggggttcacggcgccccgggcagagggaaggggccggggctcctgcgacccggrgttcgagtggtggagtccggagaagaaaaatgaagggagagcctgggaaccccgaaagaggggtctcccagacagagctgccgactgcggggccggaagg

SEQ ID NO: 39475 - DNA, 201 bp, Bos taurus
accttttaagtcttctctggaaaggccctggagtgtttccttctcttcagggatgtgccctattaaccagggcgggtaggtttggggcctggcgagggcarggtggggctgcaagctgcacctatgatgaccctcatctactcaatgattgctgtgcccactccccctggggaggcagggacagaaatctgctcctggagc

SEQ ID NO: 39476 - DNA, 201 bp, Bos taurus
tcgctgtttccatatcgccgtggctggcgggtcatgtccgagagccactgctggattttatcagatgccgtatggtttctctccttaagatgtgactttartaactgccgtgttgatgaatactgggaggaacctcggcgccgtcgcagtgtggcttcgctgcgtgctgtgttggatttagttttcgttactctctgcctc

SEQ ID NO: 39477 - DNA, 201 bp, Bos taurus
ggaaaatcacttccttaaatacagctcactcgggagcatgtgatgattaaaaaagaagcctcagaggaaggttagaaggtctggcagggccttctgttctkcttccctttcttcccagttccctggagaagccttttcctttaggggtctgttcgcagcacactcacggcgaggggcggaggcgcctctgtctctagtctc

SEQ ID NO: 39478 - DNA, 201 bp, Bos taurus
agttgaactggattgcccacctgggaaggaggacgcaggtgtcccgaagctgttgggcagtggctgccagcatggcctgccagagccgtgaagagacacaycggggcacagccctctccactctgtggcggccgtgagctcgccggcccgagcacaccctactccttccccagcaacgagctggcgcccttgtctgaaacc

SEQ ID NO: 39479 - DNA, 201 bp, Bos taurus
acgtgtggctgtgactgggaatggactgactccagaggcctctgtccacggctacaaggtcggcaggaggacttccgcctcttgactatgtacgggctaartgaacaaaaaggccacaacctcacctccacgtttcctgtcttcaagactctagtgacactgggaatgatacacaacttcctatgatgcttctaagcgcct

SEQ ID NO: 39480 - DNA, 201 bp, Bos taurus
ggaaaacggggattcccgtgttccctctaaacagagactggctttaccaggaaggactggggcagagggagacactttagctgaaattgactcaaaatgtraaatgagaaactgatgccccaaccctctggtttgtttatctagagaggaaagagcagaccaactggaaggggtgcctggaggggcggcctggtgtcgcag

SEQ ID NO: 39481 - DNA, 201 bp, Bos taurus
gtgactaagactgcgttcccaatgcaggggtctcaggttccatccgtagtcagggaactagatcccacatgccacagctaaaggtcctacatgttgcaacyaaggcctggcacagccgaacatatatataaagttttgtaagccagaagacagcgggccagtatatgcaaatgctaaaatttaaacacttgtcaaccaaga

SEQ ID NO: 39482 - DNA, 201 bp, Bos taurus
taatcgggatcctagcgaagagaaaagtcgattggccaaaaatgaaagactctgacaacagcgtgctgggtagcactgatgccacggccctggggctgctygtttgtccggggcaccaagagctttcaattgcaacagccacgagagatgggagagcaggccgggacctgggcgaggttagcactgagactccaagaccag

SEQ ID NO: 39483 - DNA, 201 bp, Bos taurus
ctttattttcagaaggctacttcatcggtgactgattttctgatattagacccaccttgcgcccccagcgtaaacccagcttggttgctatgcgctggccyttctgtgtactgctgaatttggagtgctgattcgtctagcttccatctgcagtggaaggctccaaccctctaaaaggttttcagttcccacccagaggag

SEQ ID NO: 39484 - DNA, 201 bp, Bos taurus
tatgatcccatgggcaaaaacatgggccctgttcattaatgctgtgtcttaaggctagctcccaggttgcaggaggagagatggctacgtggagacatagmctctaaggccatagggcagactcgcaggaacaggcctgcagcccgcgaagcccgcactttgcagctgtgtccaggcacacaccccatctcctgcagcctc

SEQ ID NO: 39485 - DNA, 201 bp, Bos taurus
cagtcgcggggcccacagcacctccaccccctcagcccaggccagcgtgtcagccttttctggtgttgtccccagggccattttagacatttcttcccccractgatccccgtgaaatgctcagagcaaggaccgtgtgtgagtggaagccgcctggatgccctgcactttggctcttcagttcgctctggggcccctctg

SEQ ID NO: 39486 - DNA, 201 bp, Bos taurus
accttggccaagtctgaaagatgtcacttcagaggtttccctttctgtgaagcacagacagctctacctgccccgctgggctctcaatggaatttcaggargaaacataaaggaccctggcctgcctgtgcagtcgctcagtcatgttcgactctttgcgaccccatggaccgtagcctgccaggctcctctgtccatggg

SEQ ID NO: 39487 - DNA, 201 bp, Bos taurus
ttgtttttgcttctcaagtccaaggcagcatgttcgtgttgaggagctgctctcaacactgagtttggtgagagaacgagagttaggttgctaaggtgtcyggccagagaagcagtagtggggtctctcgccctgcggagaagggggctccctctttgaaactcaggagcttgtctctgcattggcagagacatggcccag

SEQ ID NO: 39488 - DNA, 201 bp, Bos taurus
ccttggggcagaccggcccttacaggggaacttgtctgtggggccgctgcccgtgaccagctccccgcctgtacagcagggagacgagacccggtgcagcygcttctgcttgcggagggcctgaagcttgggggcccttgttaagaaaaagaatctgaatcagaattagatgtgaaagcaggtgtttgcttactagttgtt

SEQ ID NO: 39489 - DNA, 201 bp, Bos taurus
ggctgtagggcggacctgcagatggctccgctctctgtctccacttgtccacgtgcctgcgttattaagggggccaggccaggaagcatgaaattagttayggtcctgtgcggacgtgtccacactgcctgtgtgtctcctgtgtgctgggcaccaggccaagagaggtgcatgagacacagtcccgagtccctgggaact

SEQ ID NO: 39490 - DNA, 201 bp, Bos taurus
gagaagggggtgtggggggtctcaggggcctgtcccccatctttctggcattggaggcagggctcggcgagattgggggttggggacacaagggaggaggyttggcggatggtgggccacacgcccttaacaggtgggattgctaagcagggtctggggtccttggggtcaggcccacatgactctggagacgccccaacc

SEQ ID NO: 39491 - DNA, 201 bp, Bos taurus
cgtgggcagccttcctgttagctggcgtccactgctctcaatgggcagactctggcccagggtcgtgcagtcagggacaggggggcggggggcctgcccaytgaatccagcaccaagttcttcctcctgttaccgtgtagatccagacagccatgccagaggtggcaggacaccccatggccctgcttcaaaccccggctc

SEQ ID NO: 39492 - DNA, 201 bp, Bos taurus
aagccctgccgagcggactgcgcgtgcgtgtcttaggactccaaggaaggatgctgacgttgaccgatgcgataaagagacgcagtcagcacggctgggcygactgtgcccaggtgagtgtccagaccagtgtcctgcaaatccgagcctcagcaggcttttttaggaaactcctcctaaatctgcccgcagagactgaag

SEQ ID NO: 39493 - DNA, 201 bp, Bos taurus
tcaggaggtcgaggagaggcccagggcgccgggcgggggtgccagccagccttccaggcagcagcacgtctgcagagctaggatttgcgcattccaagaayggctgtcccagcacgggcggccgccacacacacaggtcactggctttacggtgtccaggagccagtgcaccctccttggtggctcacctggcacgcccgg

SEQ ID NO: 39494 - DNA, 201 bp, Bos taurus
tggggccagctgcccactgacaccccgtgccagctcgtcccattctcctctgttcacccatccaaggtcaccacgtgaggcttacccacatctggatggakcagctgcagcagcggcctccgcgtccggcagacattcaaggcccctggacccagcggggcccggcctcatgtctgctgtcctcagtcagagacaggggta

SEQ ID NO: 39495 - DNA, 201 bp, Bos taurus
tcggtccccccggcccacagccacctccactgcagccccggctgccaccagcttccaggtcaccctctccagcctggctgtctgcctggcccaccaacacmggtgccctccctggacctttggagctgggctccagaccagccctctctcccgacctctgtccttctcatatgcagcttcctctgccatctcactgtcatc

SEQ ID NO: 39496 - DNA, 201 bp, Bos taurus
gggtgtccacgcggctgggcgcgcggcgggggtgggggtgccacttacccggaccaagcgtgctccctgcagcagccacacctgcctgccagtgggcgggyggcctgtcatcagctaaggaagagatccctccgacgaaagagcccagcaggcggcactgacctttgtaaaattttattaaatcaaacagcccggacaagc

SEQ ID NO: 39497 - DNA, 201 bp, Bos taurus
aataattcctaaactaatgatttctttttcttatcttatgcattggccagggcttccagaataatactgaacagaagctgtgagaatgaacatttttataytattaccagcccaaagggaatgcatgcaaattgtctccgttaaacttgccacagatttgagggaaatagtcattatttgttgggaaaagtcgctttagct

SEQ ID NO: 39498 - DNA, 201 bp, Bos taurus
agctctagagtaccacagtatagcaaatatctcaataaatcagatgacaaaaaatttttttatttccaagtgcatataaaaattatgtttatactatgctrtagtctatcatcaatgtacagtggcattatgtcttaaaaaaaaacaatgtgtatactttaatcaaaaacactttattgctaaaaaatgctaatcatcatc

SEQ ID NO: 39499 - DNA, 201 bp, Bos taurus
agcctccaagccccatagacgtttggccagtagatctttcagagaggcttttattcatctcactcaccgaaaccctcggtgagattattttgtgtgtgagraacctcagagctgcattctaaacatggtgacttctacgtgaccgataaatatgcctgcctgtctgaggctaaaattggtctcagtgggtataattgaaat

SEQ ID NO: 39500 - DNA, 201 bp, Bos taurus
tatccatcaataaatgcaattgtaatagattctctaaaaagagaatagtggagaatgagagatctttctaaaaggcccaaatgatgagaataaaaactagkgatgagacttccctggcgatccaatggctaaatctctgcaatcccaatgcaagaggcctgggtttgaatcctgatcagggaactagatcctacatactac

SEQ ID NO: 39501 - DNA, 201 bp, Bos taurus
gtgtacttcccattgaccagacacaacctgaaatcagacaacaaggaagtaagtgttgggtcagactcccaggtcacagaatatagtgtgaacgtaggaayggtagaacaagtaactgaaagttactgagagtaaattctaaaagttctcatcgcaagaagaaaaaattgttaactatgtaagttgatggatgctaactaa

SEQ ID NO: 39502 - DNA, 201 bp, Bos taurus
acttgcggacatgggctgtacctaaatctattaacagaacgaaggtcatgtgctatggagagaggaaaggcacctgtacgttgagtcggcagaagtcattytgaaacttccaccatcaaatagactataatttaatatttgatcattaaataaagagcaggttaaacagtttgcaaatctgtgtgtaccccatgatataac

SEQ ID NO: 39503 - DNA, 201 bp, Bos taurus
ccttaagttaaaggaagtgttttcttttctaatgttatactctttacctatcagtgtattgctgcaacttgaatcattcttttcctgttgttggagataamgttatcctgtactgatgtatttaacacttgtattttattattgagcatatcaataaaaatattaaaaaagaacagattgttttttaccaactctatagca

SEQ ID NO: 39504 - DNA, 201 bp, Bos taurus
caaatgcacatctggacacatccagtgtacagtccagtgtctaggccagtccagtatacaccagtgtgtatctagtatacaggccaatatacagtccagtrtacaccagtgtacatctagtacacagtttagtatacactccagtgtacaatccagtgtacgtccagtatacactccagtgtatatccagtgtatgtccag

SEQ ID NO: 39505 - DNA, 201 bp, Bos taurus
agaatgttgtcagtctaaagagtgacagaggcaacgtttaagggtatcagagacagaagaaggagttaaatagaagttagagagactgggggaattagatkaggtcaaagggtagaggatatgggagaaactccctgagcaggctgaaatgcctggaaattgtggtcagcaactggaaaatctaaatttatggcttagagg

SEQ ID NO: 39506 - DNA, 201 bp, Bos taurus
ctttgtggccagctagcccattacatacatatgaagctattattgataggaatttaacttctaacttctactcagggggaagatgaaagaaaatggaaccmtggccttgcattcaaatcccctggcgagtccagaacataggctagacctgctaaatggaaatctgtgagtgaaggtcccaggaatcagtatttttgtaaa

SEQ ID NO: 39507 - DNA, 201 bp, Bos taurus
cctcagagcctcatcagccctgatttcacacagaccacactgttccccctgcattgggcattttccagagagtttggccaagagttcagactctgtgatargaattcaggtaaatggacagaatgtctggacttgggctacttagtgaggtacgtaaaagagcagaaatgtgacccataggaagagccgagaaagtgggat

SEQ ID NO: 39508 - DNA, 201 bp, Bos taurus
atctgctgcctcagcatcaccatcccaggtgctggcaactgctcttctccatttctataatttgtcatcttaagaatgttttataaagcaatggcaccccrctccagtactcttgcctggaaaaccctatggacggaagaacctggtaggctgcagtccatgggatcgcgaagagtcggacacgactgagcgacttcactt

SEQ ID NO: 39509 - DNA, 201 bp, Bos taurus
aagcactcagagacacagagagatcaccacaaagtaagagaacacaggactgacagggaatcctctggcagtccagtgattaggactccaaactttcatgkccaagggcaccagttcatcaattcctagatctctgcaagctgcacagcgaggccaaaaaaaaaaaagactgacacttgaattttcacaatagaaggagcc

SEQ ID NO: 39510 - DNA, 201 bp, Bos taurus
agctggggagaaggaagaaggcaacccagggccaaaaagtgaggagccagggcaagaaggtgttctgaagaccgcaggggagcggggacagtctgagtatrgagaccttcacccagaacagtgcaccgacagacagaggcgggtcctctgatccagaaacccaccttccttctaaagacacacgtgtcagaacccacacgg

SEQ ID NO: 39511 - DNA, 201 bp, Bos taurus
agcttcatgtaaataattctgtgtactcttgctcagcattgtatctgtgagttatccatgttgtgattcatttattaatacctctctgtagtgttctgtcrtgtgacttagaccacagtttatgaatccattctactgttggtggaaatttgggttgtgtccagtttgtagttgttatgaataaagttcctacgaacattt

SEQ ID NO: 39512 - DNA, 201 bp, Bos taurus
tctctgcccccgagtgtgagcttcatgagggcagcagagacgtgggtctctgcacatgtcctggcatctagcagagggcctggcacacagaaggtgctcartgcttgctgactggctgaggaaagaggaagtccagtcatagaggtgactccggccgtgttgagcgttaaagaagctgaaggtgagggttagggaattggc

SEQ ID NO: 39513 - DNA, 201 bp, Bos taurus
gttcatagttatcagggaaaccaatagaggagcatgtccatcatcttccctttgataaactatcttagcggtgaggttctgatctagagatgagaacaatygctagctgggccccgggacaagtatgcaggtatttactgatcaaatcaatgattaagaggggaggtcagtcatgtgagtagggtgtaggtgtgatagaga

SEQ ID NO: 39514 - DNA, 201 bp, Bos taurus
tacaaagggaaatgttgtgaggtaagggcatgatttttttttgctagtgtgaaaatttcctcctcatgttctctaattcatgttacggcctggtctttacrcctgtcgttggctgaactgttgattccctagctccgctggatcctggtggtgagtagtgtgtggcagtatctagttaaagaccttcaccggtgctgaggc

SEQ ID NO: 39515 - DNA, 201 bp, Bos taurus
ttggaaggtaaattacgtaggccttcagaacatacctctttagtactcaatgttaaaatcctagtgtagattccttttggaaaggggagggggaattcacrtttagaatattacaggccatggactccacttactgtatctggtggtcgcaggatcagaaggtgagatgtttctggttagtaagtaggctctcagcatatc

SEQ ID NO: 39516 - DNA, 201 bp, Bos taurus
gtcagaacgtaagaattgtcaaagggcagtggtggtgcggcgtgggcaactaccacagtaactaggaaacgctggccttggggtctggatgcagaaggaarccagtcaggtcaggaagtagaagaggatgaccagaagacacgcccttctcggcctcttatgcccactggttgtgggttcagtggtgccttctgcctctcg

SEQ ID NO: 39517 - DNA, 201 bp, Bos taurus
tcaggttcgaacctcacctccatcagtgccactactgtgaagccctggccaagtcacttaacctctctgagcctcatctgcaggctttcaggaaacagaarctgctacggtaggtcaagtcggccaaagcacttccaccctcaccctcctccccatatggcccaccccaaggccagacaggatatggagggtgcccttcca

SEQ ID NO: 39518 - DNA, 201 bp, Bos taurus
tgccggcctcgttgatggaagggatttagtcataggtaactactttgtgctctgcccttgtgcccttgtctctctgcctatatccttaggatctagaaaaycaggccttgattctactgagtaggtcgaatgattctaggaatggttcttggctttgttgaaataggaggtattggggatagttccttttttacaaaaaag

SEQ ID NO: 39519 - DNA, 201 bp, Bos taurus
aaatgggtggatctatcctgaaatgaagaggcggtcgctgataaatgaggtatgccttgtcctgagttgtctgaagctaccccagggccccagagatgtgmcttcaccctcactgaacagtggggggaaaactgagacccacgaaggtgaagcatttggccagggcagaaacaggattctttctgcccagccctaggctta

SEQ ID NO: 39520 - DNA, 201 bp, Bos taurus
catcatcttccctgttcaatctagagttcccccacgaggctggggacggggtgcttctccttctgcgggagggatccaggatctgccattgccgggccccmacctgaggctctgtcccacattatctcttctacttgtaggactcagggtggagttcatgttcacaaggatggcctgacagtgacctctccggtcctgatg

SEQ ID NO: 39521 - DNA, 201 bp, Bos taurus
ttgctgaaggcctggcttcagctgctgggttcaaaggtgcgctggtcaggacggtgtttcaggagagtctctgatgtgtcttgttaaacctgctgtgcttytcttcggtctggccgagagtttttacgccaccccttttatacttgaatgaactgagtttcgcggatccaggagcactctgggcatcgcccctcggcgcgt

SEQ ID NO: 39522 - DNA, 201 bp, Bos taurus
gtgctggtgtgaggcatacagcctagagcaagaaggtgccggagccttccctgcctggtcacgcgggcttctgtggccctgatcccgcataacctgatgaygacaggtatgtaccactgccctaggagcacctgtgtgtgtcacatgtgggcacctgtacaggtgtgctatagttctgcccagttcccctctttgggccag

SEQ ID NO: 39523 - DNA, 201 bp, Bos taurus
aaaccatgggatcttaccctgtcactccaccagggaactgctcatagcagtggggcaagtccgtccatctacttcaaaggcccctgaactccctttccccrtttcaggctcagatatgcacacccactttctgcctccttcatctttccactacctcaggaaggaggctctagccattattccctggcctgtatctcctac

SEQ ID NO: 39524 - DNA, 201 bp, Bos taurus
tgctgatatgggacccctccctccatatctttggtctgggcccctctatgagcctaacggagctctgaattccctctaagggcacacaccaaatcaaatgrtaaaggtgggacttttgactgggctgaggctagaaggccaggccggaggcagcttttatggtaatcattagcaagggctgtgggaaggtgagggactctg

SEQ ID NO: 39525 - DNA, 201 bp, Bos taurus
cctcttctcctgcaggatggggcaggggacaggcactggctggggctccgaacccagcccccatcctcccccaacagccccctccccaggggccaggaaayactactttgagtttccattttgcagtcaaagacatcccatccatgatgaatgatgtcaagtgcttacttttgctggccaaggtttacaagagtcataaaa

SEQ ID NO: 39526 - DNA, 201 bp, Bos taurus
cctcgaccaagtggtccggctttgtggagtggaggaaacaggcaggatagaggccagcccactccccaacgccccttggcccctgctcagttaccctgcayaaagcaaggatgtctgtgccaagtcccgtgccatcattctagccctacgtggaagctggtcttgggggaattccacccagtccctgaggcctgcgtggcc

SEQ ID NO: 39527 - DNA, 201 bp, Bos taurus
tattgcaagtctttctccatcaggctcaatctacactactcatgtcctgcctgtttgtcctggtaattcaccctcccttaataatcctgtctcacagaacygggcttgtggcttagtggatggatgaactctcctggatatgtcattgtatcggagttcagtctcccctttcggtctgcaatgcccttccgttctgtgtgc

SEQ ID NO: 39528 - DNA, 201 bp, Bos taurus
tttgggtttcacaatgtcttcgctgccttctccagacgctgttctcagctgttcatggagattctgcccaaatcagcatgttgattcgtgcaggcccccaycatcaggtgaccgagagtgatgccgagaggggtgctgacccacacccgcgtgtattctggctccaggtctctccaatccctatcctacacttccctaact

SEQ ID NO: 39529 - DNA, 201 bp, Bos taurus
gcagattggcgagcaggcattctagaattgttctgccttcagggaacaggccagctcttggcactgaccaaggtagaaggaaaagaaagctagagagtcaytgttttttaattaagttttgttggagtattattgacttacaatgttgtgttagttcctgttgtatagcaaagtgaatcagttatacatgaacatatattc

SEQ ID NO: 39530 - DNA, 201 bp, Bos taurus
atgtgacttgatagctatttctacacagagatgaagctgatttctccactgctctaaatctggactagacttgagacttattttgacaactagaatgcagyggggagcctgaggccatcccagttgacaatctagtcttcaagaggccctgcatggtactggtcacttttctggaaccatacctctgccgtgtgaataagc

SEQ ID NO: 39531 - DNA, 201 bp, Bos taurus
agaggagtgagttttgtgaaaatcacacttttcttttttgacagaataaacacaaaggggaaacttttaaatagaggtagaagttctgaacatacacagcyaccctagcaggactaactggccttagatgcagccactcagagtgtttgctttctcttagagacatctttctgccatgaaagtggtttccaaagtcttgca

SEQ ID NO: 39532 - DNA, 201 bp, Bos taurus
tctgatgacaaaggaataagttaccacttcttgatttgaggcagttgggattctgctcccctggcctccactttgtctttgattgccggggaaaatggttrtcttggctaatgttaaaagacagatctaagtgtggttggaaagtctgttccaggcattgtcagagctggactgtaatagtgtatgtaactctggaccaca

SEQ ID NO: 39533 - DNA, 201 bp, Bos taurus
ggaccagtacacgggtgagtgtgactttctggccactggagtcacacccacttagagggtcacttgaacactagcaacctttgtctgggaaaagtagtgaytgggctcccttaaaggcctgacatcttcagcgatgccactgccttaggcctaaagaacccaggacacgactcacttggcagattaaccattagtaatatg

SEQ ID NO: 39534 - DNA, 201 bp, Bos taurus
acggtctccttagaatttgctgctgtgaagggagttttagatggtcagacactgggacactcatgtgcatgctttattttacttaaaaagtattgattttyctgctctgggtcatagttgtggcacatgggatctttagctgggacaggcaaactcttagttgtgggttgtgggatctagttccctggtcagggatcaaac

SEQ ID NO: 39535 - DNA, 201 bp, Bos taurus
taatataaatgatatagagatagacgtaagggatatatggagaatattggaggagtccagacaactttctgagttgcctaaggcctccactctcagaatawattttagatttccaaaaataaagagcaatgtttggaaataaaattaaaaatgaagctaacaacatcttcaattaaccaagtagttattatgggccagact

SEQ ID NO: 39536 - DNA, 201 bp, Bos taurus
cagctccttcagaaaatggccaagtgggggaattcatcagaaatccagcacaaggtgtcgttacattgccacatcttgacaagtcagagctacacaacttyagaggacattggtatatccactgggatatagaaatagacgacataactgcaaagttaatttctgcctttgcataagtgctgaacaattgaaaatgcaaat

SEQ ID NO: 39537 - DNA, 201 bp, Bos taurus
ttctacacagcgattcccagtagtgaatggagttttagggcaacactatgtaaataatggtcaactgccattatcacctttgtagaaagaactggtcatakgagtttatgtgtaatgagcaatgtgcagagggaataaagtcagtaggcttgtatattccttcattgctgagaaccttctatatgaaaagcattacgaaaa

SEQ ID NO: 39538 - DNA, 201 bp, Bos taurus
tacatgatttatgacagaacatatcggttcagccagtgatttgggcaagaatggtgagtgctgaagatcaaacatggtatctcatccgtgtctcacatgcmtgctttgtttcctggcacacagtagggggctgacaaaattcttagagtggatcaatgagcatctgtaaagagaagagactattgcaagctgtatgtagtt

SEQ ID NO: 39539 - DNA, 201 bp, Bos taurus
atgttttaaattattaattattagggcaaaatatcattcctagaaataactagatccaacagaaatacattgactataaaatagatgattttggtataaaraatcttatatggtcttccccctccttccaaactaggttctacacatgtatgtcagttggtttattctgtccagttcatattccaagttcactatacatta

SEQ ID NO: 39540 - DNA, 201 bp, Bos taurus
ctccagttgaggcttaaggttacacacagcttgttaccagcacagccagcacccaaatcttgtgctcttctcactccaagcccctaaatcacaggcctccytaaatcacagatcagatgagatcagatcagtcgctcagtcgtgtctgactctttgcgaccccatgaatcgcagcaccccaggcctccctgtccatcacca

SEQ ID NO: 39541 - DNA, 201 bp, Bos taurus
tcccagcattctgggctccatctttcatttccaaataaccatgatttgctgccatgtgatctaattaaagtccaggccctcctcacatgctttgaatgatmcctataaaagttttcattgtcccagttgtttctcacctcttgtgactaacttctacatccaactttttctctcatcactctggccatctgataattgtca

SEQ ID NO: 39542 - DNA, 201 bp, Bos taurus
tcctagtaaacagtagcaagggccccctcatgttttcagtgtagactaggtgggaagcaggggttcccaacttcacccaaaagttgtgaagagtccatcayatgctgcagtaatgtacgaacaggcctgtggaggtcagggcttccactactctccagttataatgaaaccatcgcttctatggtgtcagtagaagctatg

SEQ ID NO: 39543 - DNA, 201 bp, Bos taurus
gacctagcaactaaaccaccaccaccaccaccgccatggtcttctaagcaacattaatcatggtttgatgaaaaggtgagggatggtggaagccaaggtcytgttttaagtgaagtattactttttgagaatttttaatatttactctctaatcaattttcaaatgtgtaatagagtatttctaactatagtcaccagaga

SEQ ID NO: 39544 - DNA, 201 bp, Bos taurus
gacttcgctggtggcaccgtagataagaatcggcctgccaatgcaggggacacaagttcaatccctggtccgggaagattccacaagccataagggcaackaagcccatgggccataactagcagaacccgggagccacaaccagagaaaccactgcaatgagaaacccacacagcacagctacagaggagcccccactag

SEQ ID NO: 39545 - DNA, 201 bp, Bos taurus
cttgtgattgattttttccaccaagtatcactcacacagagaaaaactggacctcaagcttttcccccagcatcctggtgtaaaaatgtcaaaagataaartaatctaaatatcaatataaattgctcaagaatccagaaatacattcaacatcaaatgatgacggccaattcaactgcttagaaacactgtcagtttcaa

SEQ ID NO: 39546 - DNA, 201 bp, Bos taurus
ggtgcacactgctgacctgcagcttctaggcatggcagctgtggccgttcacccctgacacccttgctgcaaactaccccctggctgcagggaactgcctyacccagggtcacaggccttctcaatggctgcctttcacttgggcacaaagccctagcctctcatctaaaatacagcacaaatgtatacatgcaaaacaga

SEQ ID NO: 39547 - DNA, 201 bp, Bos taurus
aaagcaataacctctctaaatattattttcactctagctttaatctcaatggccattttgagttcaaagccccaaactgtgtatattcataggtaagttaytgaattcacaatctgatgtgagtcactgtcttaagtgaaatgctagctctggccccttctgaaattatggtgaaaggtaaaatttacttgcaagcgtgtc

SEQ ID NO: 39548 - DNA, 201 bp, Bos taurus
cctcccaagcaaagtatttccttggctattcagggtggtgaagagaaaacactggcacagataaccttacaatatgccaagcccagacccagggacacacrtttaaaaagtcttacataagacttccaatttttcaacaaatgctcatttatccagtaagaaattattattggtttcctctttatcaagtacattctctat

SEQ ID NO: 39549 - DNA, 201 bp, Bos taurus
ctagcccatctcctccaaccacactgaatttccctgttgcgtaattaggctaaattctcataacatactcttctgatctttgctatcgcttaataaaatcrtaacaaaatatttgtgtacttcctcattgaatattcacctgccacattaaactgagagccttgtgaggaccacttctattttgttcgctgctatatgcct

SEQ ID NO: 39550 - DNA, 201 bp, Bos taurus
cctgtcactttgacttgtcactgaaactctgcttcatataataacatccccaatccatctgggattctgctttgattgttctactgaacagcaccacatcrctctaactgtgcctcttacaactccacactgtttaagcattccaacagatttggaagccaaaaaacagaaaacaaccaaacagaaatacatgaaaacaaa

SEQ ID NO: 39551 - DNA, 201 bp, Bos taurus
tcagtggctttttgctagacacgtggtcagacaatactgacagccttgttcaataaaacaatacaacacagcttatgtctctaaggacagcatcagatcaytaggtagaaattaactgcttttcttgtctggtacctcattaaagctcaaaaataatagttgttctgactagttagcactattgcacatctctgaggatca

SEQ ID NO: 39552 - DNA, 201 bp, Bos taurus
gacaaaaaaaatgcatccacctaaattaaaaaaattcacgtatttacaaagttcagtaactgttaagtttcacatgcagaagttagtgcacaggaaaatgktggtagtagtgtctggatgtcttgaaacgctggaagcaatgaagagacacacaaacacattacggtttagctgtaggtcaattaaacgaacctatgcggt

SEQ ID NO: 39553 - DNA, 201 bp, Bos taurus
agtttactctcttggggatccaacttctgttgggtccatgacgcagcatttctctttctcaggctttatctgctcatggtttatgaatgtaaatatgactyattaaaatcctggtttgagatcatacagaaacaggtcatttctggcccctgaataatcttctctattttaaaattagcttctgtatgaaaaagttatctc

SEQ ID NO: 39554 - DNA, 201 bp, Bos taurus
ctccctgccatttaataggaggaaatattcagtggagtagccagctactattatttttgcattaatatcaacaatgagcactgtgctatcactgttggcarttttctccttctaataaataatttatagttatttgtatacaagcaattataaataacttcttacacttaaaaagttaacgaattattttagttcattttg

SEQ ID NO: 39555 - DNA, 201 bp, Bos taurus
taaggagagttacagaaccacattctcaaactaattggaaataacagaattttatgagccaagtggtcatctaagctttcacttcaagttctaaatcattyacttctccacatctgctataattctctttgttttttccccagcagagggtgcaaaatattaaaccttggaactactgcataaatgtgaataaaattatac

SEQ ID NO: 39556 - DNA, 201 bp, Bos taurus
agatcagctaaatctttgaagcttcacgagccatatagtctttgtgtcagctactcactctgctctcacagcccgaaagtggccctcgcacaacgattgargaggtgtgagtacgttccgaaagatgtagtttacaaagcaggtagcagtctgggtttgacctcctgggtgtttcttgctgacctgtggccacctggtatg

SEQ ID NO: 39557 - DNA, 201 bp, Bos taurus
atgaagacaggtatcagaggacagttatagtaaaactcaaatggcaaagtacagaatgttcagtgattagcggaacaggccccatcttctaattagagagyagagcaggctttctggcagatgtaatatgtatagcaagacttgaacgatgactgggatccactggagaagagtgttctgggcagggggaacagcatgtgc

SEQ ID NO: 39558 - DNA, 201 bp, Bos taurus
tcactttaagctgttgaaaccctctaaatcttcaaaatatgtgtatctaagccaattgttagttttttggatttattggcacttccacagttaacataaarttaataggaagccagatgtacataaaatatatatttggcttttaaaaaatcatctaaatatgtcttggaatttgacaagaaaatatcattttccatttaa

SEQ ID NO: 39559 - DNA, 201 bp, Bos taurus
cgggcaactctctagttgctgtgcacaggctgctcactgcagtggtttctctcgttgcagagcacaggctctggggccctgactttaatagttgtgacgcrtgggctcggtagttgcagttcccgagttgtacagcacaggctgagtggtaagaaggaatcgactttgcaaagccatcacagcagtgcacatacagggcct

SEQ ID NO: 39560 - DNA, 201 bp, Bos taurus
aggtactgttgcagtgaaacattttctcatggccccaagagattaccattcagagacaggaggggagctgcctgagttccctaccctgggctcttttttarattaaaaacaagagttggccctctttctgtccatctgcccgccagctggacagcactttgcttgccctgctgctctcacacacagcttcccaaaagctct

SEQ ID NO: 39561 - DNA, 201 bp, Bos taurus
cccggcctggactgccttggattgtgcaaacctgggagccatgaattctcttgtctcttccagctcacaattcagcagctgaaacctcaggtttgtcttgyagggccagaagttttgtctccctgcctcagggggttaagtgactgcttttgaaaggacaaagcaagagatgccacgataagataaggagctctgttttca

SEQ ID NO: 39562 - DNA, 201 bp, Bos taurus
gcattaaggagctcgaaaaccatttgaaagaatgtttatcaagcccctactctatagccaagacgctgtcctagtgaatttaccctcaggttcgttgaatycccacagcccccaattcaaaaccgtgtttctttcaccccaagggtcatgttttaaagggagactctagtcagtatgtgtctcacacttaatgagcatgtt

SEQ ID NO: 39563 - DNA, 201 bp, Bos taurus
gggaagggcgaacatgggccggagggctatgtctggttcacagctgtctttgtaaagaaagtttcattggaacatggccatatttccttgcttactgatgkctttggctgctttcacctacaaaggcagggttgattatttgtgaccaacaccaaaaagacagcggagcctaaaatattgactatctggccttttacaaaa

SEQ ID NO: 39564 - DNA, 201 bp, Bos taurus
atccaataggccagtaagtagcacgaaggcacgatgtaagtatctcccactacacacagactggcctttcctttgagaaacgggccttttggattttacayggggactagctcacgataagcacagtgagtactgccccactggaggaatctttctaaggcctgtcaaccaacaaaactgtggatattgaaatatttctgc

SEQ ID NO: 39565 - DNA, 201 bp, Bos taurus
atagattaactattgttagtggtacaacttcagaaggtcctttccttgtcaggtatctgtctccccaccattaaaagaagatggccaacaaaatccgtgaktctcaaagaacaggcttgcaaaacactggtattaaaatcgagacaatgtaacttggtgacaggccacaatgctggatataaatttgaatctcaatctgaa

SEQ ID NO: 39566 - DNA, 201 bp, Bos taurus
attaaatgcctatgtgactaactagatacagagcacagcattagaggaaagggaggagcttacagtctaacacaattggcaagaatatgcataggcagccrtggcccatggctggttgactctctcaatatggctgcaaactcattaaacacactaggagggatttggtttatactaaacaaagtgaacacatttccactg

SEQ ID NO: 39567 - DNA, 201 bp, Bos taurus
agtaatcccaaaacataaaaaaaaaaaaaactgagggttcaaaacattttcttttcctttatgccagcattataaagcatcacctttgggcaagtacacamatctacacatgtgataaaatttcatagaattatacaaaatagttgttcatattgaaaaactgacagaatcacataaggaactatagcccagttgactatt

SEQ ID NO: 39568 - DNA, 201 bp, Bos taurus
ttcctagatatctcttctaaattatgaagatggtgtattagatccaagctccattgtccctttgatagatggggggacagaaggttttaaaggaaatgccmgggtgattctgcctggaatgactgcttgtattgaatgcacgctggaactatatccaccacaggtaatcacaaaagcaccccgcatctgtttgatagtatc

SEQ ID NO: 39569 - DNA, 201 bp, Bos taurus
agtgcacgaaaacagggtgctaaatagactgtataaaaggcgcttatttatagtatgagagctgaagcaagaaggcagcgtgtctccacgctcagcctcckctgtgaacatttacattgagcaactaaaatttttcatcgctctgtgcagacacgtgtccaaatgactgtggaaggactgaggttgttgattttggtttta

SEQ ID NO: 39570 - DNA, 201 bp, Bos taurus
tgggaactgggtctcaaagatcctgtaaaaactgcaaattcaatgactctgcacatgattactaagttatggtctctggaggtgggccctgagaatctggytggttcttacacacaattattccttctaagtgatgcttccaagaaggctaaggagccagagttagttccaggattccgaatggctattttgtagcaaacc

SEQ ID NO: 39571 - DNA, 201 bp, Bos taurus
ttaaaaagtatgaaaatattgaccagaaaaaaattttcacatacttttaaaacaggatattgttaacttggtaaatatttgtcactgttcaataatatgawtcctcaaagcgaacactacttatagtctccactatcactagaaagatggtgaagtctatgatttgttggtacagatagcctttgaaacaactctattttg

SEQ ID NO: 39572 - DNA, 201 bp, Bos taurus
gtgcctggtgaaagatctaaaaatgtccttctttttaaagaaagaaataagtataattagatttcacaaatggcccttgctttagggcatggtggaggggygggataaattgtcataagtgtatactgtgtgtgacacaggccaggaaacacccacgattaaaatcatttcctaggatatatttttaataccctgaaaatg

SEQ ID NO: 39573 - DNA, 201 bp, Bos taurus
agacccatagtgggttttgaaagtttctgacatattcctaggaatctaaaagaccaaagaaattttatgcagaaaatcttcaggaacccgcctccccccgmcacacaaatgattagagctaataaatgagttcaacaagttgcaggacataagatcagcattcactatcaattgtatttgccagttttatcagtgaataaa

SEQ ID NO: 39574 - DNA, 201 bp, Bos taurus
cttggaaaggaaggagcagataggggaataaatagttataataagaattattaaatacttgctgtatatctaccactatactgaggcctttatctagatcygtggttctcacagaagcaattttgcctcccatgggacctttgacaacagagacatttctgattgtcaggtctgggggtatggggtattgcactagcgtct

SEQ ID NO: 39575 - DNA, 201 bp, Bos taurus
tgatgtgaagacctggcaaagagagatttgaagatgccgacctgtaagactggagtgatgtcgcagcaattcaaaaaatgctggccgatacctggagctgraagaggcaaggaatggattctcccctagagcctctggaggaagaaagacactggcaacacagtgcctttgattttggcacactgctactgatttcaaact

SEQ ID NO: 39576 - DNA, 201 bp, Bos taurus
caagagtcctccttgcctagaccatctattcatgtgagttatttcatgactacgaggggttctgaaggccataggcccagtgctttggtggtttctttttkgacttgctggctttggtttcattacattgtttgactagttaccgcctcagtccacagcagtggccttggagactgcagtcttggagaccataagctccaa

SEQ ID NO: 39577 - DNA, 201 bp, Bos taurus
tcagtcacctggctttgtcggttctgaattcctgatattgaccagagcttctctattcacttgcttctgctttgttccgggccaccatcaccactggttcwgagtagcggtgtgatcgcctatcaactgtacctgcttccagtctcaccccaggacatctaggctccattctgctgcaaggcctatctttccacaatgcaa

SEQ ID NO: 39578 - DNA, 201 bp, Bos taurus
tataccacctctgtgcctttaggactttagtttattccactgcccataatccagtcagtcaaaatcgtatgcatagaccagtagtatgaatagataggttrtacacatcagcatatttgctctgtgtgtgtgtgtgtgtgtgtgtgtgtgtatcacctggcacgtggtagacactcactcaatagtggcaatttttctctt

SEQ ID NO: 39579 - DNA, 201 bp, Bos taurus
caggaattatttttaattcagccctatagctgccaaaagactcttgcattgatggcatttactggatagatcatctgttagtgttttataggcccatactsaagtagtactcatgaagcagtcaggtcagttcagtcgctcagtcatgtctgactctttgtgatccctgaattgcagcatgccaggcctccctgtccatcg

SEQ ID NO: 39580 - DNA, 201 bp, Bos taurus
tcagtttatagtgggccatcagacatttaaatggatgggtttttttaaaatgcattaatgttttttttttcatgagcatagccgtcatttgttgagaagcygcaatgggccagatgctgtgctagagctgggactctgacagatgtgaacaggtcagatgtatttttagttctatggcgcttttattctggtgaaagaaga

SEQ ID NO: 39581 - DNA, 201 bp, Bos taurus
ttccaaatcgacttcattccgtgttgccaaaaatagctcactcttgtaacttcagattattttcttattgcctttgaattcatcagttaataatgcagccragcaatacgtactttttaattcctctacatatgccaacatggtgtgtctttttcaatatgatacccccctccccaaataatgttctctggaaaggaaaaa

SEQ ID NO: 39582 - DNA, 201 bp, Bos taurus
aatgctaatgaagctatgtctatacagtatgtactgaacccacaagaagagaatgattgttacaagcagtgcgactggaacacaggcgttttagggcattygcaccaagccttctaccagaagaagttaagaatcacccagtagctacaaagcaggctctgagctcacttctgaaaatcatgaaaggacattggaggcccg

SEQ ID NO: 39583 - DNA, 201 bp, Bos taurus
aaatcttttgtgcaaccaaattggccacggggatttgaaaggggaggatactaatattgtcacttggctgagaatcagcataacccttttttttccagatkatcccagtaattgtagagaaattgctctagacataaccactggaatggcagaatctattaaaaatcgaaaagctaaataggcttttataagcaaagatcc

SEQ ID NO: 39584 - DNA, 201 bp, Bos taurus
ttaaatcagtgcggtgtcttgttttataagacccagatcaacacactgccagaccatttgttaagccacccctgcatcctatttgtaaatgtgtgtggctrcacatatcaaagccagcaaaagctttgggtaaggaacaacgcgtctggtcattttttttttttaagagcttctgatctttcttcatcaaagacatggagt

SEQ ID NO: 39585 - DNA, 201 bp, Bos taurus
ggggcgctgcagaaggccttgcctagcacgctgcagcgtggtagggtctttaacccgcaactcagtataactgtgtagcccttattctcacctgccaccgyggccagaatgcttcctgtgcatcaggtacccagagatagtggtggaaaaagccagaatcagtcggcctggtgataccggaccttacatctctacgactgc

SEQ ID NO: 39586 - DNA, 201 bp, Bos taurus
cttgaaggggttgcccagggaggtggggggaagagagggaggaagagaaagcagagtgtcagtcactgggattgggaaccaggccctggatgcgacccccyaaaggcttccactcatcttcacctttattctcagagtctcccaaaggctggtgccaaagctgacaacaggccatctgtggctgaccatcaccgctcttca

SEQ ID NO: 39587 - DNA, 201 bp, Bos taurus
gacattaactgtggtaacaagctattagatcatcaactctgtgcttcttccagggcgggcaaagtatctaaaataacacagttatcatgactgcctcctcraaggtaaatacattaactctcactcccaattaacaaaggggctctttacacacttaagctaaatccctctgtgctgtataaaatacttgaggtatccaat

SEQ ID NO: 39588 - DNA, 201 bp, Bos taurus
ccacttctctatattgagcactcattacctctaaccttaaacgtcatcaaaaatattttcaaggtgttgtttcaaacgagaaaagtaatgttgcttctatraagttgtattaagcacatccctatcttttcagttcaagccgcaactctatcaagctcagtttacattttgggccaaagttcttggagctggtccacccta

SEQ ID NO: 39589 - DNA, 201 bp, Bos taurus
tacactgttctgtaaatctacagttatttcaaaactgaatgcttttgtgtttagcgtgtgaacacttttgacagattatttaacgatggccacactttttrctttttaaccaacccattttgataactccacatggaagtaaggaaatcatatcaggcaaaatgtatgttggggaccaatgagaccatgagagttttcatt

SEQ ID NO: 39590 - DNA, 201 bp, Bos taurus
accacacatttcctaaaaggggaaaaaaatacatccttgacttggaattgaaaattacagttccatggagaattgactactaattctaggccaatccatakcaacagctgttatcaccgcttcatttacatgtcacccattcagaaaactgtcctgagcctgagcgacgggtgtcattctcattttgctgtggccataagt

SEQ ID NO: 39591 - DNA, 201 bp, Bos taurus
acagagctggggttcggcacgtgccccatccaagagaacacggagtggcactggggagaaaattccaactgcaaagccaggcacacggagacttgaagatyggccctgacaacaactaacacaccctgtatctgcaaaatgaggatcagagcactattcatttaattcttatatgacttccaggggataatgtttatgaag

SEQ ID NO: 39592 - DNA, 201 bp, Bos taurus
ttttgttgcacatagtcatggggggggtcactttttatatagttatcaccctgtgctgggctggcaagtcaactgtggtttgtctggaaatccccactgcratacaccagaacaaatgtatttattgctattttttgctggtagaatatttataagggaaagtcaactcccaggttaggaaagagcatccgtgtcccttat

SEQ ID NO: 39593 - DNA, 201 bp, Bos taurus
tgaaatttaagatttactctcttaattttcctgtgttttgtacagcagtgttatctgtgttcctcatgttgtacgttgtatctctagtactaacttataaytggaagtttgtacctttgaccatcatcctccaattcctcctctcccctaatccgtcacccctaatagtcacaagtccggtccctatttctatgagtttta

SEQ ID NO: 39594 - DNA, 201 bp, Bos taurus
tcaagaaagtgagccttccttgaagtgaatggctatttctgtcttatttaggtaatttgttcttgtccagctcacattaatggcaggccttgtgtcatatmtaatagttataataaggcactcaccaaagcttcctcttacgggtagaagatactttgggttttactctcatggagtaagaaggaagagagaatagaagcc

SEQ ID NO: 39595 - DNA, 201 bp, Bos taurus
acttctcaggctgtaataagggctatattagctaatgtatggtaggtctttggcatgctatatgttgtgtgatttttaatttttcatgattatgattttcrttataaatataatctaagtctcagagctagttattcgtggagatgtaactgaaactctagtgggccttttattcagtgctttctcttccttactttgcta

SEQ ID NO: 39596 - DNA, 201 bp, Bos taurus
caggatccttgcggttttcactttttatccaaagcctcctgctaagggcacaaaagcctcagtttagaatatatacttcctagcttcggaggtcaggggcrgcggccgggaggagataccccacgccccaagccagaggccaggggaggcaggccggaggagataccccacgcctctaagcccgaggccaggagcgacggg

SEQ ID NO: 39597 - DNA, 201 bp, Bos taurus
actgaacaatttcattttgacctctctgaaagggtgggtatggagggtcagaagtatcattaatagaaatgttaatgagcatttaaaaaaatgagttaatwtggatttgccaaaaatgaagtgaccagagtaaccttccttttttgaccatgttactagagtggaagataaagtcaagtttgagaaatagtgtatttcagc

SEQ ID NO: 39598 - DNA, 201 bp, Bos taurus
cactagtatcttgccagccttcccacaaccagcctatttaaaaatacattctgggaaatgtacctagctaggtattaaaatatgtacttggtatacatttkggggatattatatgaaacagccaggaggcagcaatcttgagaaaattagagaagatgcaattgcactaggaaactttttgttcagttttcatctttattt

SEQ ID NO: 39599 - DNA, 201 bp, Bos taurus
ttgttttatctccttcatgtatatattgtatgggcttgtatcatattggaacttcaagacggggtctggataaagcaaaaggaatgaatctttgaagttamatttataacataaaggttgattacaagttttaaagagtgaagttccatttaaacttccttagaagattcaggagttaccctctaatatgaacacttgatg

SEQ ID NO: 39600 - DNA, 201 bp, Bos taurus
gtcaccatgacctgggttttccctgtctctgctctgctgtggagagtttgctccatcttgcactggttcctcagaacaatgggtgcctgctcagggcaatygaggccacatgttgccttgtgcacgtccagagataagagctgctgttaacacattctgttctagccttcctcctttatagtaaaattaaggcattataat

SEQ ID NO: 39601 - DNA, 201 bp, Bos taurus
aatctacaactatagcaactgagagctagctaaagttctgaatatccagagtcagattattttaaaattcttgactaggagttgactttctgagcaatgayatcatagtagatcttaagaactaagaaagacgctaaatctttgcagatcttcatgtaagtgtcagacattttcctctataagagaagaccttctaagttc

SEQ ID NO: 39602 - DNA, 201 bp, Bos taurus
gtacctgggttgttagaaataaaatattggcagtcctgagttctgtgcataatgcaaaatgcatacttaatgtatattagaaaaatgtatgcatcaagctmttcttttgttattttctatatgtgattctcatccccccatgagatgttggtgcttttgacctagcaaacacacatgtgaataattgcttgaagttggatt

SEQ ID NO: 39603 - DNA, 201 bp, Bos taurus
tgatgctctctgtctagacttcttgatggtgtatgtatgatgttccttagaatatgacccccaactttcacatccttgagcctggcatggcctgctcatgyaactcattttaagagacggattgttggttaatcaccttcatgaattaagccaatgtgggcagtaaccagggccagacagtgtcctaaaccaatgcaaaga

SEQ ID NO: 39604 - DNA, 201 bp, Bos taurus
agtctggaaagttgatgtcctcctcctcctcttggcctctcctcagttctcccagttactttcagtggcagcaccctgttccttaccaggatctcctgctrttagacacctcaggcaagtgggcctggccaaggtgggtggtttctatcaatagttccctaacacagccgccctccacctcccatggttcaggcagtaatg

SEQ ID NO: 39605 - DNA, 201 bp, Bos taurus
tgactctatcgtgttctgtttaactccctcatcccctaggattgtaggggataatggtggctttttaaaacatattttgcacaagtattttgcttacagtyctgattgatgatgaatatttgcttggtgatgtctgcagaacctttggttagagtctgtatatagagttaagtgattagggtcagacagttattgggacta

SEQ ID NO: 39606 - DNA, 201 bp, Bos taurus
aagctccaggagatagtgatggacagggaggcctggcgtgctgcagtccacggggttgcaaagagtcagacataactgagtgaacagcaacacagattttsccaagggcatcacctcctatagtaagagagagagacccggtgtcgttctctttagagacaaaggggaaaggaaacgttcctttcaggaaacctgatcatg

SEQ ID NO: 39607 - DNA, 201 bp, Bos taurus
atctatatagaatacagatgcaaatttaggctcagaggggttagagaacttgctcaaggtcacaaagttaatagtaggtggatttgggatccactcaggcytgattcccaaaacctatgtatgctctgtggagaaaaactgaaaaccaaggacttgcagcaaatgtaataaataccacttccaatttctttcctgtattgg

SEQ ID NO: 39608 - DNA, 201 bp, Bos taurus
aagatgtcaaattcctgattaggagaactttttgttaaaatattacatatatatgcatgtatagtttatatactatttcttaaaacatgccttctctatartagtttttcaatctaccaaatacatttggaagatattcagatggcttgtggttcgaaccacaccaatggtttgcagttccatataattagtagataatta

SEQ ID NO: 39609 - DNA, 201 bp, Bos taurus
tggacagctttggaatacactcagggtcctccctagggggggcacgccttttctcccctgtgtcctcactccaggcccagtgagattgtgtgaagaagccygggcttgtggacaggggagggcagagtccgcggaggacactcccgcggctggccggctgctcaggggaaaggttcagacgctttttgaccgggcactgtt

SEQ ID NO: 39610 - DNA, 201 bp, Bos taurus
gaaatccagcactccggccgaggcatctcggcagcactgcatggttcttaattgtactttcttttcacaatgtgtaaagatgtttgttttcagatcctcamctctcaaggcaaaacagaacttcaaagatttcaaacttcaaagaacacaagaaaattaacgtgatatttgggagctgtaacctgtgtttcctcttgccaa

SEQ ID NO: 39611 - DNA, 201 bp, Bos taurus
taataaatgtgtcttatttaaggccgctaagttcatacagtctaattctgcacaaatgggatccgagtgctggtgcagatagtcagtgttccctcatcctrgaggccttccctgcctcccttcagaagaaagttttcctgcttttgctgtcttgggttattcaatgacctgctttttcactttgtgaagcagggacagagg

SEQ ID NO: 39612 - DNA, 201 bp, Bos taurus
gaatgacaacacaggctagaaaacacgtccacgtttcaagtgagccgattgtgaaactaggagaatgcctctgttatctgtaaacacccacactggccttyggtatctacatatgctctttattttcacactcatacactgactccctgagacgagatctacccagcacagaccccgccaggcacagcactgcatgccagg

SEQ ID NO: 39613 - DNA, 201 bp, Bos taurus
tgcccagggcctggcacatttcaaggggtcgaagttccttctgcccccatatctgtcgtcccttcttgggaaaccgtgacgggggcacagcatggctgttmagagtccaggccacagactttggacttgggggtggcgcaggggacctggttctgccattcgtcagacgggtggtgacccggccacctcacttaccatctc

SEQ ID NO: 39614 - DNA, 201 bp, Bos taurus
gatctttcttgaatcacggccttagccaccagggaagccccagtgggcttcaataatcctggcgcttgaagacccgtctgccaggtgagggtgtggtagtrctgccagcactgccccggggccacacttctctaggaccctgtgacactagcagtgccagatgtgtttccagctcacccctctttccattatggccaccaa

SEQ ID NO: 39615 - DNA, 201 bp, Bos taurus
gttgtcatgtccattttatagaggaggaaactcaggcccagacaagttaaacaacttgcccattgtcgcacagctggtgagtaatggaggtagtgcctctygcatgagacagtaggctcagggcccagggccacaatacctttagaagccacaggaatgttgtaatttgtttcagaataaggaggaaaagaaattcaaaat

SEQ ID NO: 39616 - DNA, 201 bp, Bos taurus
agtatttgcaaagcagggccacagaacacccatgtgttccatttgacaataacaaggaagggactttgcatcaaaacaaaagcactgggagcccagggccyctagcacaacccatggaagtcctgactggggcaatacagggcacgccaagatgaatggtgtcaagccacaaacaaagaggcctcagagatccacatccca

SEQ ID NO: 39617 - DNA, 201 bp, Bos taurus
acagatcccttcagtctgtctgggccaagaccagcatactcctgacaagaactgagaatgctgcctgccccccaacctcccacatcccctggtctcagcarccacagtctgcagtgccaggtgccttccttcaccccattcgggcaatcttgatgctgtctatacaggctgttgtcagcccagcagtccagttcccaagaa

SEQ ID NO: 39618 - DNA, 201 bp, Bos taurus
aaaattttatggggcattcattctctgtataatatagtttctttatcatttatttaaagttgatttttcatattctacctttccagtcaggaggataatayatgtaattctgtatatcccattatctgatgatgtatgtcacttggtctccttcaatttacacttttacaatatttgaaataatttctctattcttctccc

SEQ ID NO: 39619 - DNA, 201 bp, Bos taurus
ttgctgattcttatctacttactgttatatatttttaaatgcctattatgaactactcattatttactttcatccaaaggaaatatgtcagcttttacaawcttttaattatcactggtaatgggatgtgggttaaatggcaactgatttatactataaattaaaaccattaccaaattttccatcaacaactattcagca

SEQ ID NO: 39620 - DNA, 201 bp, Bos taurus
gtgccaaaagaaataacattttaaatgatgaagaaatttgtcttaatttccttaaagttggaataaaagatatgtaaattttcaaagaagcctgtaagaaytgatgttgctgaaataatactgtactaacacttagtctcagttttcctcttagctttctacagtattttctaaagtgtcctacacagcaagatggggaag

SEQ ID NO: 39621 - DNA, 201 bp, Bos taurus
attatagaagagatgctgaaaatgagaatgaatatgattaagccaaggaatagaagtttcatattctgagtgtcttttccagttcttattctcacacaatragctaagccatatgggtaaacttaacatatttttggacttaacatagtatatattattgctgcattttacatatttataattaatgcttttttttttgct

SEQ ID NO: 39622 - DNA, 201 bp, Bos taurus
acttcagggcagtgtggtaagtgttctaccacatgcctttattcatttctttattcactcaacaaacctggccttggggccttgctaaagattttggctgyaattctccaggaagtggaggttttggaaaagggatgtgacctgattggaatggtcttttcagaaggtcaagaactgagagagcaggttagcgaagtcagg

SEQ ID NO: 39623 - DNA, 201 bp, Bos taurus
atgtttatcacctgtatggagcttactgtcaagtgggagacgcggttgttcaaaaataataaagtgtatgatttggtgaattattctagttccatttgttmtttgtagagcattgtttaaaagttgctgcaagatatctttagttgcaattgttttttataaatgtgtgacattagtgtaaatattttgcatcagaagttt

SEQ ID NO: 39624 - DNA, 201 bp, Bos taurus
actgatccctattgtcaggtattttaggctctttgcacatcttttgcttttatagtgttttctcctcctaaaagttaccttagtggaggtcccatgtagargtatttagtccaaatagtttagacatgtgtctgctgtttgctgataaatgaagtcatataaacaagtattaatggcagcagagcagtcagtggtgtaata

SEQ ID NO: 39625 - DNA, 201 bp, Bos taurus
tgtaccctctgtgtgttctgtcctcaccgacctccctgtaatgtcctctgcctggaaaaaccttccttcaatctgcctgtccatctctctttaagtccttyaagttttagcttaagagttacttcctctataagccctttctgaatttcccagatgcacttagatgtttctttcttaatgttctctttgttctttgtacac

SEQ ID NO: 39626 - DNA, 201 bp, Bos taurus
tccctttggatttttaaagtaaaaaaataaaacctttaaagacacagcaaaaaatttccactcattttttttaggcccccatcttcactggttttgtacaycaaccttttcctactccacagctaaggactcataatggtgagaaggacaatcgtgcatcttaaataatgtacaaatgtatggattcaggagagccatagg

SEQ ID NO: 39627 - DNA, 201 bp, Bos taurus
tccactggaggaggaagtggcaacccagcccagtattgttgcctgggaaattccatggacagaggagcctggtggaccacagttcgtggggtcacaaagartcagaagactgagcacacttgcaccataattgctaggttttcctacgggaagtatttgtatttaggtgaagcctaggacctggtcagaatgacaactgag

SEQ ID NO: 39628 - DNA, 201 bp, Bos taurus
gacacagggatgagaatttggagatggtcttaatagggaaaatttccacagtagttgtaagtattgtcatacacaattatggaacacagtctcctacttgytctaatcgagtatttagttatctgtggacagaaaaataaaatctgagagaatatgacctgattactatatttccctggtaatttcttcagttaagaagat

SEQ ID NO: 39629 - DNA, 201 bp, Bos taurus
gtctggacttggggttattttgatggatcataatgcctttgaggttcatccgtgctttggtgggtgttagtctgttgaaaatcaatagtgttccattgcayggatgaactgcagtcatttgcccgttcacctgttgaagttgtccagtcactatcacagtggataccccttcagagggatcttgcctgaatgactgtgggg

SEQ ID NO: 39630 - DNA, 201 bp, Bos taurus
caccttctcctagtgaagaagaggttgtcatcttaagaattttatttggtgatgctgggatccagttttggttgaatagtggatggcagcaggcacatagkttcttctttcaacttgcattagggaagcaggagagcaagccaggttgatggtgggagggagggggcaggaagagagctagttggaggaggcctttgaact

SEQ ID NO: 39631 - DNA, 201 bp, Bos taurus
tctctgtgcccctcccctgatgacagattgccagttcctcctgtttccaaccacattaggttcaattacctccgcctaatcctcatattcctcccaaatgkgtcccccgggcagtttctataaattttccaccgctccaagataatgagatattttttcctcttctaaaaatatatagcattcattcttctttccatgtct

SEQ ID NO: 39632 - DNA, 201 bp, Bos taurus
cacttgaggcaaaatagaacttctttgttcaaaggaaatagactttttaaagtcttgtaaaatagacccacaatgctttttgggactcaaataactctgamccaaaacgttttaataaattaaacataagtggattagaaacagacaggttgtcttttcatgaaatacacccaggccagactcagaaggagaagcacagag

SEQ ID NO: 39633 - DNA, 201 bp, Bos taurus
tgatgtcggaaactgggaaggcccttttgggagcttgctttctcagaataagtcctcaggaccatggaaaacatttgggcctttctttctgtgaaaacagygttgcttcacccttacatgatggatttagccctcagcccttgtagggttacaagagaatcagggcaaccttcagggctggcctcctggggccccggctcc

SEQ ID NO: 39634 - DNA, 201 bp, Bos taurus
ccagaaagatatcacataaaattgcaaggtgtatgttttgggttatatctgggacagggcaatggtttcttcaaatgaaatggtggtaccatccagctggygagataaggaaccatctcaggctgaaccaaagtcagaattatggaggcagaaaactctgttccttctgagccagaatgatcgctcatgcctatctgcact

SEQ ID NO: 39635 - DNA, 201 bp, Bos taurus
cattctgttttgtaaattagtgaatggaggagaggatgaagtgaactgcctaaattcatccagtgagtatgtggcagggccaaaatttgaacttggactayctggttcccacacatatatatttaactactgtatgaagtttggccagtgagagaaaggaagaaagatctctggggggcaggctgagataggcagcacacg

SEQ ID NO: 39636 - DNA, 201 bp, Bos taurus
tctcctcctgtcctcaatctttcccagaatcagggtcttttcaaaatcctgttggacgctgattattcatcaggcctcgagccaggcccaggtgagccttyggaaagcactcagtcagaagctgtgtgtgaaggatcaccttctgccctccaattgcaggtcacaattcaccaggccagttaggagaacagggaaaagtca

SEQ ID NO: 39637 - DNA, 201 bp, Bos taurus
ttggaaccaaggactggggtaaaggcataggcctctagggttccaggtcccaaggtcaacgtgatgtgctatactttctgatgtcagaaagggccttctaraataagatacacattgctactatcctgtctgctgtttcaccccaatgcaactgcccccagaacctcaggccatgttcctatttggaaatagggtctttgt

SEQ ID NO: 39638 - DNA, 201 bp, Bos taurus
accattgttattctgttattactgctagtatgatgctgacgcaaatggggtggcttagttatttcactctatgattctaaaccaaactagggtcagactcyggacatgataaaatcccacagtctccctggtctctcctacacaagaactattaaatttttcagcttaagacccatctctgctcagggtgatttctccttg

SEQ ID NO: 39639 - DNA, 201 bp, Bos taurus
cgggaaaagagctaccacaatctacaacagctacaaagctattttataaactagaagcttcgagagtcccatctcttgctcctgatgtcagagggccaaaygttcattcctagatcaagattactttcactggattgttttttgaagggctagttccccttgaaagtatatttttttgttgttgtttttaatgagaagagt

SEQ ID NO: 39640 - DNA, 201 bp, Bos taurus
cttgaatcctagcttgagctacttcattagagtactctgggcaaaagctcttggtacctaatgaacatccattaatgtcagctcttattattgttgatgaygataacaagacaatgctgatgataattaagtaaatgagaagaattacactaaaagctgggccatgaggatgaccaacacattcacagttcagctctgagg

SEQ ID NO: 39641 - DNA, 201 bp, Bos taurus
gctaagagcccaaaacaaaagctaaaattaatgttaaaggtgaagaaaatctcagaagcagtcccatccagtcgatcacaaacttgaaaaagaaaatcttygtctccttatagggctttcttatcctctttcctctgaacaatctttcttttgcctccagccaagaatttttttattaatccaaaacaaaactgtaatatt

SEQ ID NO: 39642 - DNA, 201 bp, Bos taurus
tcctgcattgcaggcagattctgtaccatctgagccaccaggaaatccccacccaaccgtgtgtacatcgtacatcaccttaacctatatttaaagggccrttcagacagcgagacccaccttcctacacaggagagaaggggcaagggcacaaccttgaaaaaaatgacacagcccctgaggataccacataaactgctt

SEQ ID NO: 39643 - DNA, 201 bp, Bos taurus
ggccagaacatcaaaatagaatgagaggatgagctacccagcagggaaaagaaaaagccaaaatgagcacgacctgtcctgcagggagcttcacccgagtyccaatgggccccctccttgctgtgatgcccggctatcatcatcttgaaattcttcataactttttaacaaatggaactacattttgctttcccactgggt

SEQ ID NO: 39644 - DNA, 201 bp, Bos taurus
ggggattctttaccactggaccaccagggaagtcctggtgattgctctaacctttaaatcaaaacaccagcaccaggatagcttatcacaggggcccttgmggggcgtgtttccctactggtttcctagcaaccaatgaaccaatcagacatcaggtcacttctgcctataaccagtaaccttggcttgcagggtgtgaag

SEQ ID NO: 39645 - DNA, 201 bp, Bos taurus
gtgttcccttcagtggccccaggacctcctcaaagacagctgggagtcatcctcgttaatggaacgtctcagaggcccattttgggcccttggggaatacrcatacaccaaacttggaaagaagtattttgaggctcacagacttccacaatgacacagcccaaggggcccacctcaagggcagtccacaaacgtgcactt

SEQ ID NO: 39646 - DNA, 201 bp, Bos taurus
ggccagggcccccatcacagcccaagttgatggggtaacattattgactgcatgtctctgtcacccacttggacagagagggctcctcaagggcacagatyagcttccaacccagccctgtctccccagggcctggcacccagtctttgaaagtcagatcctatataattaatgatgttaaagcctgtgcaagtggatttt

SEQ ID NO: 39647 - DNA, 201 bp, Bos taurus
tttgagtaagctccaggagttggtgatggacagggaggcctggcctgctgcagttcatggggtcgcaaagagtcggacacgactgagtgactaaactgaaytaaggagtaaaaacaggccccataaaaagggtctggagtccaaatggtcttcaacttcttaacaacaactatggaagctggaagacaagttttctgaaga

SEQ ID NO: 39648 - DNA, 201 bp, Bos taurus
tggcacagggacaggcgtggggacagaacagatgacccagcccgagccggagtgatgtgggagctgctggggccaggcaccttgctgggccctcctcaccraagaccttgtctcatcctcacactgaccccatgtgtgatcgtgcaggtgtgacaccagagggctgagtgtgtgtcatagagcaagggaaagaaccagtgc

SEQ ID NO: 39649 - DNA, 201 bp, Bos taurus
cacccccactcccacctcccagggacagacatctattaccaatctttgattttaatccccaccgagaagatagggacactggtcagatgtgcccacaccaytccaatcaagaaaaaataaggtgtgagaccagttaaatatgtatcacaccagctctctgtctgaaatactgttaacaaccagttaagtgctccacttcac

SEQ ID NO: 39650 - DNA, 201 bp, Bos taurus
ttatctccaccttgaaaaaacttttaaaattaaaaacaaaacaaaacttagaagagtcaagctactcacccaatatcagggggcagggcccttttccatcyacttactttgcaatgttttttatgatgcaatgggcttaatgataatcatgctgacagggccaggctaatgagttgagccttataatgcaaagctttccac

SEQ ID NO: 39651 - DNA, 201 bp, Bos taurus
gtccatttatggttgtgggacagtacctaagatgtctgggagtcttgctgctgacagttgctagcagatcagactgcctcctggcccaaggtgtgaaacayggattgtgactccacactgggtctctgttgggcttcccttctcctgatcctttggccacagaaggcaggcttttcttggttcttctgtctatggctgctg

SEQ ID NO: 39652 - DNA, 201 bp, Bos taurus
cccactctggcttcatccaggtcactgcctgctgaggaaagggcaccatagctactctttgctaaggtgcaggaggatccacctaggtgctgccctccagraacgatgcagacaggccttgctcctctgggttacagcagccccagtcatggctgccaaccttgttgcctgcattgagattgtccaggagagcctcaactt

SEQ ID NO: 39653 - DNA, 201 bp, Bos taurus
ttgagtgccccatgtggagctggactccgtactgttgactgaatgaaggacaagtgccgtcttctcgcctaggcacataagagacctgtgccgtcctctaygtagttacctaggccacattgtcatggccgtaccttgatgttttcagccagcacccactgggggacacttcagttgcttaccttttgataaacctgatta

SEQ ID NO: 39654 - DNA, 201 bp, Bos taurus
gcagctcatcactgagcagttgggcaagcgggtgtctcctccaactgtcagaggcagtgttgaaacaactttccgtgccaacagtgatgggccagtggtcrtcttccctggtgggactggacccaggctgcagatgttccctctgagaaattcggattctggggccacacctttttctctttgattagccatgaggtgcag

SEQ ID NO: 39655 - DNA, 201 bp, Bos taurus
ggctcagccccgtgtccctagtcccagccctgctgcctggcacagaggagatgcgcagtgactgacagccaagtggatgaatgagaatgtggtcaaggccrggagggctggtgtgccggctgagcttggctgggcgtagaagccacagcaggaagtgggcttgaggaagacttccaggatgggagactgactgagccagca

SEQ ID NO: 39656 - DNA, 201 bp, Bos taurus
tactgtaaaagctggtcacaccctacacaacacaaagagtaaagaaactcccacatttaccacacagtcccctatctggatgacctttctccttggccctraaagaggaagatgcggacacaaaaactcccctagtaatagctcagacaaatctgagggtctggaggagccgaagggcctcttcactcttgtgagggtccc

SEQ ID NO: 39657 - DNA, 201 bp, Bos taurus
taagactccattcttccagtacctggggcatgggtttgatgcgcagtcagcaaactaagatcctacatgcccatgggtgtggccaaaaaaaaagaaccacyaaagggtttattataaatatgggctccctgctccacctggcgctatggctggtctgggaactggcatttaaaccagctgcaccctagattctggaaaacc

SEQ ID NO: 39658 - DNA, 201 bp, Bos taurus
catgccaggccaaggcttcccccaggacccacactgccgccctgatggttcttacggaatgagggagggagcggggaggaagaggaggactggaactgccytcattaggtgctctgctcccagaccgtcagcctgtgccctggcctgggcttggggtgggcagcatgtggcgtgcagaagaggtcaggccgggaggcgggg

SEQ ID NO: 39659 - DNA, 201 bp, Bos taurus
cccattcaaatctggtccccatgactgtggagaatctcttttctaattatcttgtgacccacttccagttttagccaggcttgcttgcccacagccttccsaggccctgctcacctctgcctctccacctatgctctggcgaccagccttcctgcccagggatgcatgtgactcctcagtggagctgcgaagccctttctg

SEQ ID NO: 39660 - DNA, 201 bp, Bos taurus
tgggccagtaactgtttgaaaacctgagcatacacaagtgatcaagaaaggtaagatctctgctttagtggagcttaaatttcatccatccccccaccccyggccagctatccattcaatgtagttttactgagtcccattcctcaagaaagatttgaaaggctcttgggaccacagtcttcttcctcagttgttgaacta

SEQ ID NO: 39661 - DNA, 201 bp, Bos taurus
ccacaagcgcacgaagacctgccctcagtagggccatcctaattgaggctctctgaagtctatggtgctcccagcacagagggaggggtgctcttctaacrctgtttaagtggccagtgtctgtgagtcatggacaaaaatcgtaagacactgacaatggcatggaaactttggttattctgggaagtaagacaaaattca

SEQ ID NO: 39662 - DNA, 201 bp, Bos taurus
tgatacgtccctcccttgtcctcaggaggagtgctggcatctccatgactacctactgggcaccctgggtccctatgtgatcaacgtgaccagggcagccrtggcctgcagtcaccagcggtgccatggccatggccgttgtgcttggcaaaacccaggacaactagaagtctttctgcatctgcagccagatggcagccc

SEQ ID NO: 39663 - DNA, 201 bp, Bos taurus
gtcacagagtcagacacagctgagcgcacacacaaaggataccagtgtatgtataactgaatcatgtcgctggacgccttgaccaacgctacgtgatcaakcaagcatatgccaaaatacaagtctaacaaaaagaaaataaatccctattgtattttttttcaggcttctggcaccttggcctgtgtcacagccctggag

SEQ ID NO: 39664 - DNA, 201 bp, Bos taurus
ctcttttcaagggcagtggggtaggtacttaagctgaaccttggccgggccttgtgaattcaccttgagaaaagcacttgttctcagcactgcaaggcccyattagctgacttcccccacatggcttgcctgctcccctcccacagaccaagcagatgaggagggaggaaagggcactctatccaaaaccagggttgctgt

SEQ ID NO: 39665 - DNA, 201 bp, Bos taurus
gtgggtaaggcctgtacatgccgccacgcaccatgggtcgcaggactgaggcaggctgcgtggtgatgggcagtgttgcagcaattggagtattgatggtygagtagatcatgccatcggccgcccgcacggtggctgtggatggcagcagctgtctgactgatgcggcctggccagctgtaggccggtactgggccaggc

SEQ ID NO: 39666 - DNA, 201 bp, Bos taurus
taggcctcttccaggatggatgatttcaatttcactaaattcaatgtagttgaatttaaatttcagttcagtttggcactttcgagccctaggacaaagayagcatcacactaggccccagggatgcagcagaaactaagaccgttgagcccacactaccctcacggaagctgcagtctccaagtctggcctttgcctgct

SEQ ID NO: 39667 - DNA, 201 bp, Bos taurus
actgttgccagacacagcttgcaggaggccctcaggacacgcggggtgtcacctggcaaatgcacaaggcttcggccagctgtcccatccatctctcttcygctcaccactcaggacccataaccttcaaaggtccctccctgcagctgccacttgaccagaatggacggagggcccggttggggtcacccggaaatgggc

SEQ ID NO: 39668 - DNA, 201 bp, Bos taurus
aggcagagaacaagtcacagccaggacaacagagaagcgtgtgttgcaactcccctgggaaagctgcaaacaaggaggggggcatcaggcggcctggcccrggctaggagtgcacctggaggagaggtcactgaagctgggtctttcctgctggcttggggaattcccaggagggcttcggccgcatcagagccagtccag

SEQ ID NO: 39669 - DNA, 201 bp, Bos taurus
ccttaagctttcctgtgtaatgaggtttcctgtgtaatcctttcctcctaaaggatttttaaggtctgtccttagagtatgttgaattgctttaggactckggcctggcctgagtggcacttctctgcctccccattttacatttctaagcctgatttacagggttttctgcttccctgtcataggctacacctctttctc

SEQ ID NO: 39670 - DNA, 201 bp, Bos taurus
attctttccatcctcttggtcacattaatccctgggcaacacgtgtaaatgactattcccagagtttctgtttccataggtctgggctggggcctgagaaygtgcatttctgtcaagtgctcaggtattgctgatgccactggttgggcactgcattctgaggatcagtgacgtagaacagtacagggcagacatttatgg

SEQ ID NO: 39671 - DNA, 201 bp, Bos taurus
cttcataattatatattgacaagagttacatggccttctaaaaaaagaaagtatttaaaataaacagctaataataatctaacctcgggtaaccagttccytctcattcgttccctctgtttgaaagtccactacttcactttttttttctttaatttttattggattatagttgatttacagtgctgtgtactacctcac

SEQ ID NO: 39672 - DNA, 201 bp, Bos taurus
gcccccatggagacaccagcagatggtggtcactgtggagcaccacgcttgtctcagcctcctggctccttgggctagtggccttgagtacgtttacagakaatttacaggaacttgtgagaaaagctgacctgcgtattttcagatttccttccgcacatgccctgtgttctgtctccttgctcaacatcgaggtcctga

SEQ ID NO: 39673 - DNA, 201 bp, Bos taurus
actgattcattggctgtgtccagtgtagtgttcaacatgtccagtgagcttttactttcatttggtatattttctcattggctctttttccaacctatcayttctcatagttttccaatttctagatgaaactttcaaacttatattttacttcttaaaaataagcatacggaatcttaaactaataaaatttatatgtta

SEQ ID NO: 39674 - DNA, 201 bp, Bos taurus
ctaatcgtaaactatgatgtcgatattttcccttggctgatgcagcattaagtacctcgtcagaggatttttttttttctttatctttctgtctttggccygtagctcactagtttatgttatgtgctttcttataggttgggaattttcttttattcattctagtatctttaattaactctgtagacatgggtcaggcca

SEQ ID NO: 39675 - DNA, 201 bp, Bos taurus
ctttatcttccttcttctccctgtgtcttttcctccgtgtgtcccttataaggacactcagcattggatgtagggcccaccaagataatctaggatgatcrcaagatcctcagctaaaatctgcaaagatgctttttccaaatacagttaacatttacaggttccaggtgttagaatgtgtgtgtatgtgtttggaggcca

SEQ ID NO: 39676 - DNA, 201 bp, Bos taurus
ggccaaagtatcctacaattgaattcaaatctgacaccatgtagagttcgtgtggacccctaacagttccaccagattgctcctgcttcagatgccaactrcaagtctgggccacttgtacttctgaccaatcagttacaaggtcagaagagcggtggggttccccacaattcccctcttcaggtttgagaatttgctaga

SEQ ID NO: 39677 - DNA, 201 bp, Bos taurus
atgccaaagtcaagatggaacagaaggtaacttgggggatctgggtctccaggaaggcaaggcctcagggacctcagtactgggacacccaggatggcccyccccactttagaggcagagggggaaaacaccagcccaaggaaatccagtcacccagagtcagtgggtatcttctgccaactccagagtggcacacagtag

SEQ ID NO: 39678 - DNA, 201 bp, Bos taurus
tacttagagactgagaaaaggggaaagtattcttccaaattagaaagagaatccaaaaggacttcagaaaatgaagcaatgaaaagatgctgttctccccmcaatgaactcggattccgacgggggtcatcatattccaagcatgataacaatgcttcccgttacaaatctgccccttcaaaacctgtatccaagtctgat

SEQ ID NO: 39679 - DNA, 201 bp, Bos taurus
gtgggggccctgcacatttcaagctcacctccagtttgggatggagggatagtgggatagtgagaggaacccaggtgagacccttggcttgcctgcatctrccgtcggcctttgtggtggacctggtgggattctggaaacacatccacagaacactttacattccgagcccagctgctccatttgcaaactgggcctcag

SEQ ID NO: 39680 - DNA, 201 bp, Bos taurus
cctgctctgagctgggaactactctgaactgggactcacccagcttccccatcaagcctggcctgtgtttcaagagccccgggggttgcattcctttcgcrtcttcagaggtccccctctcagcctgggctggaggcagacaaggccagagaaggcagggcccgtgcaaatccaagacaggtgggagctgcagcccatcta

SEQ ID NO: 39681 - DNA, 201 bp, Bos taurus
cctccaataagggagcagccctcccatcctgggggtgctgccagcgtgcagtaaagtgggggtcatgatgataatttgagtatatccctgcaggaccaatrtccagggcttactggccttatagctcctgtgcgttcctagaacttgggaaagaatagtatttctcagatgatggtaaagtgttcagctctcaaatgtcat

SEQ ID NO: 39682 - DNA, 201 bp, Bos taurus
aacaaagactatttccttctgcaattctagctttattttttaaagctgtattgttaggagtacaagattcatgcctactataccatcttggtggaatatayactatcagtgtaaaatacaccttttattgcatttaatatttgtttttacagagatccagatcatagagttcagtcctaactctgctgtaataattgatta

SEQ ID NO: 39683 - DNA, 201 bp, Bos taurus
tagaaggtaacaagtgctgacttgttactcagaggcctttgggactatcccttacctttttcaggaaatagggttaggaatagaagtcagtctgtgtagtygaggtccaagtgcctctttgggcctgacactgcagctttcctatgtggccctaggcacttccaccatcttgggccaagcagagcccgggagaaaccactg

SEQ ID NO: 39684 - DNA, 201 bp, Bos taurus
gaacaatttaaatctggggggatggtgagggaggagatttcccttagaagagatggcataaacaaaagtaatgagagagaaagagggacaaagatgtggtraagacatgttactggagataaggccaaaatgttaggttgactcacggaagtcatggaaaacctttaatgataagttcaggccttatatgacttggtgctc

SEQ ID NO: 39685 - DNA, 201 bp, Bos taurus
aatgtgttaagagtttaaaaactgtgcaactcttcaaagctcacaaatattgttagaacagtcaccctgtagttagattggatgccactaaaagggtgcawcaagcacaaatggacacaagtgacgaaatatgtagaacatagagtgcacacagctgcttaaagcggggagccccaccaagcttccccagcccccagtgtt

SEQ ID NO: 39686 - DNA, 201 bp, Bos taurus
gggtcatcctgttctgctacgtggagatcctcaggaccctgttccgctcacggtccaaacggcgccaccgcacggtgaggctcatcttcaccatcgtggckgcatacttcctcagctgggctccctacaacctgatcctgttcctgcagacactgttgaaactgggggtcattcagagctgcgaggtcagccagcagctgg

SEQ ID NO: 39687 - DNA, 201 bp, Bos taurus
tgttcatagtaatgaacttgggttgctcaaaaagcaacatatttttaagcagatttagtttgttctattaaagaatacaggaagattattgatatttttartagggacttaaacttctggctttttaagagttgttaaattctgcttggtaaacaaaacgttaaagcttggtagatcaaatactactgccttgagtatgac

SEQ ID NO: 39688 - DNA, 201 bp, Bos taurus
cactgcctgtcgcggccccccaggagcactcggggcggggcttcgctgagccgaaaaccctgctgcctgtgggcgctggccctgagagctgaactgccccygtcgcccctgccatacagaagttgttccccagccccgggtccttatagggcgctgggacagggcctgtgggctggtgagcaccaccaggtacatactcag

SEQ ID NO: 39689 - DNA, 201 bp, Bos taurus
ggtcctggagaagcttctactggctcaagagccctcagggcacatctcttcccgacgttattcagtggtgtcatgtcaacagcttgaaatgggccaaggtrggagtgattacaccatagcagtcagcaaatgctacaacccagggctcctattctgctcagagctggtgaccagttaaatatgcaacagtctacccctgcc

SEQ ID NO: 39690 - DNA, 201 bp, Bos taurus
acactgaggccccgacagcccatgaagagacggagtgcctggccagccgcctgctgcttcagcctggctctccgggctctggccactgtctgatcacaacyacatacgagacgcaagctgcaaccgcccagatgaacctttcccaagctcccaacccacagaaatcatggcaggttacacagtggttactgtcctaaggcc

SEQ ID NO: 39691 - DNA, 201 bp, Bos taurus
actccttttggatgtgaatgtgggaaattaactatttccaggccggaagatggctgatcttcctgccgttggtgagactttccccttggtttgccagtccrtgaacagacctggccaaggccacgccaaagagatttagggtggctacaccagttcttcctccacagcctgcaggctgtgcagccccaggtccactggatt

SEQ ID NO: 39692 - DNA, 201 bp, Bos taurus
ttttggggtgaggttcacgaaatcagcccggggtggggagagatttcgtctagctgtgtgatctttcagaaaagtaagtggaacatgctgcctcttttcarttctgtcagtgcttccacatggaaaccaaacgcaataaaatttttccaaaacctgttctggctgagccccctgtctctcacggagtcaccccttgggtag

SEQ ID NO: 39693 - DNA, 201 bp, Bos taurus
ttaggcaacaggattgcagttacagtgtggtctcaagtccatacaggaagctgaccaaccccagggtctcctgcacctgccggggcctgctgggtgggccrggaaacatgagaatcaacagcacagtgcagacggatggaggcggcggcttcgggcagaacactgccgagctgtacttcccctgacagaagctggagctgt

SEQ ID NO: 39694 - DNA, 201 bp, Bos taurus
cgaacttgctgaatatgaagacggcctgagatgggttaggaatttgtgggagtaagagagagaggagccgtggaggttggcctcagatcctagagctgaamgctaactctgttcctgatcgctgatgggaggacacccccaccccagtcgctgccaggctgatggaaatctcaagaggaggaatggcttccctggctccct

SEQ ID NO: 39695 - DNA, 201 bp, Bos taurus
ctgtggagcacacggtcaggtccgcgtcttcggccacgcccagtgttacatcccaccagggatcctcgcggtctggccctcatactgtcctccacccccaygcgtctctgttctctacccaaagctggagggcaggggtaaggtcagggcagggcactcagaatccgtcaggaggtagatccaggctcaggcccagggacc

SEQ ID NO: 39696 - DNA, 201 bp, Bos taurus
gggctgcccatccccactgcccactccatagagtcacagaggctggcttgtggaccccctgtcttggcctgcttgctcccctggtcccgggccagtccctyagcccaggatcagctctcagagcctgggagttggacaatcagtctgcaaggctgctgtgtgccagtggcgggggaaggcctttgcagaagtttctggcag

SEQ ID NO: 39697 - DNA, 201 bp, Bos taurus
gccgctccatccctgggctggcacagaatatcaatttgtctcgttaagctgaaagtctgcactgcaccaaaatcagaacccggcccgggcagaggggccaygagaggcagagaacggggagcaccagcagccacacagatacccccttgcccttcatcacaagcagccccgccggggtccccttctgccactgggccaggc

SEQ ID NO: 39698 - DNA, 201 bp, Bos taurus
ggagtcaggattcctagttcccttcttcttgaaagccaaggtgagcctccatcctcccgaatccgcacagcaccctgggcctcacccctctccccatctcygctttccctccctcccttcccttacataggaatatttaggtaggagatagtaacagctgccagagggaagcttggcccaatctctcctggctttagccca

SEQ ID NO: 39699 - DNA, 201 bp, Bos taurus
aggccagggagggcttaagggactcccttagtttttaactgctgcctctttagctttcccaagagctagaactagtaaagaaaagtacgaaggtctgacargtcaccaataaccagcttggccacaggtcaaggtacaatatttagaataatggtcaataataaaataatacaaacaacaatacccaaaagaaatagagta

SEQ ID NO: 39700 - DNA, 201 bp, Bos taurus
taggaagattgaaatcccaggacaaaagggcctccttttctctcagctttatggaaagctccccaccattgtccaatttgcctcagatcagagaacctcgytgaggaccagcactggcctcaggtggttgccaggaaaccaccgagacgatgtgcttggccccggagggagcccagtggatattagtattccgtcttattt

SEQ ID NO: 39701 - DNA, 201 bp, Bos taurus
ccccatccacttaccaccattctgccaacagggccattcctctgggttgggggcatggtttgtcttcagctgccctcgtctctccaaaagtcatagcatcrttagcccatcttatagggccccggacaccctgggttcaaatcctgacccctagcgtataccagctgtgcagcttcaggaaagagactgaacctctctgag

SEQ ID NO: 39702 - DNA, 201 bp, Bos taurus
ctgcagaagtctctgtgtccacatctctaaaatgagggcatgaaggattactttcttgtgtggttctcagcactgcgaagattaaataaggaaaccacccyacccctagcccagtgtgtatgtagaaagtctttgaaatatgacttttctttttctccattgcatttctagaccagagaatacacagagcaggattgtttg

SEQ ID NO: 39703 - DNA, 201 bp, Bos taurus
cttgctttcacataattccactttctctttcatgttccttgagtcatgaactttccttgaaattttttatcctattcttcgagaaataggcattcttttcracatgaattcttcgcttttgtgctccagcttcctgttttgctctatttcctgcctcctcctcttagcagggactttgaccctcaagaagcccctgctcct

SEQ ID NO: 39704 - DNA, 201 bp, Bos taurus
ttaaccttaaaatctcatttcagacttttttatcttttcagactcactttttaaacatttttatacatttttgaaaggttgtactctatttgcaattattrcaaaatgttggctgtatctctcatgttgtacaatatgtccttgtaaccggtcttgtactgaatcgtttgtacgtctcactcttgcacccataaatcatcc

SEQ ID NO: 39705 - DNA, 201 bp, Bos taurus
ggttatttactctttctctgtttctgctcattttgtcagactgggatcagacgaaaggtaaatagccgcagtatttgtgtcaatacatagttgttcagtcrcttcgtcgtgtccagctctttgcaaccccatggactgcagcactccaggctcccctgtccttcagtatctccctggagtttgctcagactcatgtccatc

SEQ ID NO: 39706 - DNA, 201 bp, Bos taurus
cccgcgtgacagcaaagatcgaggctcccgcgtgctgaagccaaggacctggtgtgcccaaagaaataaataaacacttaaaaaataaataagtaaacagrtgtgatcttggccaagtctctccacctctctcgcacctctgtcctcagctaccctgacagatcatagtgagcatcagtggaaatctgcaggaagtttcca

SEQ ID NO: 39707 - DNA, 201 bp, Bos taurus
tacatagagaccacgcagtataaaccgtcacggaataaacattcagatacgccgagatcaaacagacacggccagaaacaagccctggtaaggctggtgtyatatcctgtgtacatggagaggtgctaaacctggatctgatttcttcaggacacaacccacttttctacaacaccctcacaataaaaagccgaactgagg

SEQ ID NO: 39708 - DNA, 201 bp, Bos taurus
gttaccaggggaggagccctgcgaggggtggatggtgggagggaaccacgggttagatacaagtcattgtcaaagtcttagtttttggttggtgagttcaygggttcactattaaaattaactacttaaaaaaaataactaagtgacagttgcacagcaacatagatgccactgcacttaaaatggttaaaatggcaaatt

SEQ ID NO: 39709 - DNA, 201 bp, Bos taurus
tatctcaataaggctgatgtttttaaaaagcagatacagtcatatggcagcagctgctgtgctgtaccaatcagatcctgcttcaaggccaaggtactcaytccgctacctgctgggaatgttggctgactccttctctcagagtgcctcctagaactggctacagccaagggagctgcctctttccaaagactggaaaat

SEQ ID NO: 39710 - DNA, 201 bp, Bos taurus
gaaaatgttctaaaattgattaatgatgatggttgtatcactatgtaaatttactaaaaatcactgaagtatattcctgcaataaataaatctcaggataygtaaaatataccaccaacaaagttgtttataagggaaaagaacatactatgatagctgcgaagctggcctgaaagatgctttcaacaactgactctagat

SEQ ID NO: 39711 - DNA, 201 bp, Bos taurus
atgagatgtaattttctcttctgctcttggcagtgtttacctttcagaattgtatatatactggaaataatttattctaagtttaaagcctggtgcaaagygcatagatggcataaaattaatgctaattattattagtagcaactattctgacaacattgcttaaattggagggtttattatttatatgtatgcagtaag

SEQ ID NO: 39712 - DNA, 201 bp, Bos taurus
gggaaaggtgtccaggccctctggactgtccctactacctcaccagactttagtacattcagtactggagaagcggcatggaaaagaacatcagtcttcarattttgcacaatagcctactgtccttgatcagcaccacaactttagaggtgaatgacagatacatggataatcccagaagaagggatgagtactgggtcc

SEQ ID NO: 39713 - DNA, 201 bp, Bos taurus
gccccactactaggagagcaaaagggccactctcgccagggtcacggtctttcaacgacagcgttgcctacagccgttctaccaagaggatttcaggcagyagaaggccgggagaccctctgaaatgtctttggtgccactgccccagagggtgtccattctatccacaatcccggtatcgtacagatcacagcaagaacg

SEQ ID NO: 39714 - DNA, 201 bp, Bos taurus
aaaaaaaggaaaaaaaaaaaaaaacaacaaacccacacctattagttttgtacaggtgtttgtcatcagaaattcacttttacaaagatgaggaggcccayggcacacagaatcccagaatgagagtcaagagacttgggtcagtgttagaccttagtttgctaccggatcaccatgagagagcctccaggcaaaccatgg

SEQ ID NO: 39715 - DNA, 201 bp, Bos taurus
aacagaatatagtgctttaccttccaaacgtctctaccacatcaccctgtgatatcagggctccagcatatttatttccatatccaacatgctataaacayataagtatataagtacagaaatgttggggggagagagggacatgtttgggctgaaaaactcagtagttatgccagtacgatgtccaatttgcataagaat

SEQ ID NO: 39716 - DNA, 201 bp, Bos taurus
cctagacttgatgcagagcggcagctactggagaaacctgagtggagagtgccatgatgaaagtcggcttttaggaaaaaaggcctggcagcatttgcaayctaaaatggcaggggagagactaaaggcaaggacactaactaaaaggctgtggccctaatccagcacgtgttcatcttcactggttactaaaatcgtgac

SEQ ID NO: 39717 - DNA, 201 bp, Bos taurus
ctccagtattctggcctggagaattccatggacagtatagcccatggggtcgcaaagagtcggacacgactgagcgactttcacccatctccctaatgacrtgattagaaagtggcccctgtttgtgagttcattgtccatgtgggctagaggaaagagtagggaggatcaatcaccacaataagatgtgagaaacactgt

SEQ ID NO: 39718 - DNA, 201 bp, Bos taurus
ttgggatttttaaaacctcccccagatgattctactctatcgcaaagtttgagaaccacaagcgtcagtaacagtcatatagtttgaactcacagagctamtaaatggccgagccaagtgtctttcttttctttttttttttaattgactgatctgatctaattagttgattcacaatgctgtgtgaattcttgctgcaca

SEQ ID NO: 39719 - DNA, 201 bp, Bos taurus
aatcactaacagatactgctgtgcttcctcctgcccccgagcccaagacaaccatcaatccactctgcatctgttgattggcctattctgggcattttgtraaatgaaatgatgtaatatctagacttccgtatctgacatttcactgagtgtgatgtttttgaggttcgtccgcgtcgtagcaggcctcaggacttcatt

SEQ ID NO: 39720 - DNA, 201 bp, Bos taurus
tgcagtgatgagggctgccctctggacggggaggtcactgctgcccctcagtccgccctccagatcccagtgcctttcccctggcaatggccaggaccctycccttgggtgacctttactcctgtcccgcaaggttgggggattcgcccatttaacagatgaggagaccgaggctcggcgaggggctgtggtccagctggg

SEQ ID NO: 39721 - DNA, 201 bp, Bos taurus
cccttcacctagattcactgcattccttttaaaaattacttgcacaccacggacatgattccacacctgaggtcgtcatggccaacatccactcctggccrggcgagccctgtgtgcacatgacctgctgtgctcaccacgaccccaagatgaacactcattatccagcctcacagattaggcctccagtgctcccaacag

SEQ ID NO: 39722 - DNA, 201 bp, Bos taurus
agcaccgtgccttcttagagaaggcgaggaagcaggccaatgtctggttggagggcctgggaggtccgttccaaaaggcctgggcaggaatcaggcctgarggctgcttccatttttcctgcaggatatctgaactgcccaggaggctgcccagagccgcaggacaaggtgctgggtggacaggcctcctcagccgggctg

SEQ ID NO: 39723 - DNA, 201 bp, Bos taurus
acatgtggaaggacaggcgtgatgagtgacggccagagacgagacgggggcggtgggggcgggggagctggcaggaggaggaggaacaccatcaagcaagycaacgctttccaagcgcgagctcatgcctgctgagcagtttggccctttctgattaataaacaagctttaccatcctccgggccagttattcttcataaa

SEQ ID NO: 39724 - DNA, 201 bp, Bos taurus
agccgctccctgctcccgcgtgtccgcacacgctgctgtccgggaagcccttccctcctccactgggtgacgccggagtggccgctggtctttaagggacrgtcctcaagcccccggggtccctcccaggacagacctgagcttcagagcagggtcaggtcatgctcgggtccgggtgcggctaaggccacaccccctccg

SEQ ID NO: 39725 - DNA, 201 bp, Bos taurus
tctgtaatgcaggcacattctttatcctctgacccaggaagtccatgcttaaatataagcctcaaagaattaaaaacagacgttcaaacaaaaacttgcamaggagtgttcatagcaccacgttcaccatagtcaaaaagtggcggtagccccgcgagtaaggaggagatcaataagaacacgaacaggaagctccctggc

SEQ ID NO: 39726 - DNA, 201 bp, Bos taurus
ggctcctgagtggcagagtgagaccccaggcctcgcggcgtctgacgcctgttcactgagctgcaggcgctgagcctggccgccaacctggttgggttggygcagcccgagaatccagggaatgtggctggaaacagggatctattccagctgggagagccctgggtcccgggcctccgtgcggactcaggcttgaccccc

SEQ ID NO: 39727 - DNA, 201 bp, Bos taurus
atgtgcatccctgtgctgaggagtgccttctcttctgcactttgcaaatgctcacatcacacggtttccatggcaaccggcatccctcagggaggggagcrtggaggggccctcagaaaggactcggggaaaggaccagcttggatccaggaggagggaaacgcccaggagggaggcagcacggcctagtcccgctgctgc

SEQ ID NO: 39728 - DNA, 201 bp, Bos taurus
aacacagaatgtaaagggaggcgtcctgactcacactcagtttggctttatcacagcacgtaagccgcatccaggcctttccccttaatctcacgacggtrctttccctaaaaagatcatgccgcgtgattttcccccgaatgcttcaccccagctgtgcaggcctctttcctgtttatcacggctgcactgaactttatt

SEQ ID NO: 39729 - DNA, 201 bp, Bos taurus
tgaaacccttacggcttcagtcccccagcacagcgccctccttcaccccgggtcctgaacacaggcaccttgaaggaggtaaggcaaacctcctgcaggtrggggccgctggtgggaggcgggtgctgaaaatgcagccctagaagatgagtccccagaagacagagcagaataaacaaacacctgggccgacgccggcgg

SEQ ID NO: 39730 - DNA, 201 bp, Bos taurus
ttgctctgcagaggtgtggccaggtaagggatggtgggggctgccctcaaggacccggagtggagaggtgcagggggtaaagcaaacccagcctaaccccrtgcagggtgagtaagcaaggcggccaagagctggtcagttcaattcagttcagtcgctcagtcgtgtccgactctttgtgaccccatggactgcaacaca

SEQ ID NO: 39731 - DNA, 201 bp, Bos taurus
tccacaggctgcacagtccgttggatcgcaaagagtcggacacgaccgagtgactttcactttcacacagaagtccagctgtgagccccaaactgagacgracaaatcacgggaggaaggacacagtgtccagcctgggctgcaaagataactgcaggagaggggaagggccccaagggagactagggacggcgacccccg

SEQ ID NO: 39732 - DNA, 201 bp, Bos taurus
aatgaggcccatcagagctttcaaacgggctcagctgaattcccttttctgccaggaaagggacacaggctaccttccccaagcacaccccactctccgcrgatggccacgtgctcacacaccaggaagctctccgcagcctttccttgtggctttcttgggggcccggttgagcaagtgacagcccacgtggaactgatg

SEQ ID NO: 39733 - DNA, 201 bp, Bos taurus
accatcactaaactcatgggatgcaatccaaggcctttggaaggtcaccctgtcagacgggaggctcgaagggcggctgcccacaccagccaccgtgcacrgcggccatgtcctgacacaggacatctcaaaggagctggtgctgtctccctgacctcggcccccagggatgtcccttgtgccctgagcccacccaggccc

SEQ ID NO: 39734 - DNA, 201 bp, Bos taurus
ccctgggcccagactcggtccagagaacggctcccctcagcccacgagggctccctctgttctctctgtggctccgattctcccagtgaaacctcctggarggcctccaccctaaggtgcgggctggcgggacctgctcagcaacgcgggcagcaggcctgtggctggcccaggcccggggggacccacaggcacctgccc

SEQ ID NO: 39735 - DNA, 201 bp, Bos taurus
tggttctcagtctgcttgaacttgccttcagcccagacgcccaggctccaggccctggaaccccaggccatggctgggcagtgcgggacgggcctgtaccrgggcaggtgtaggccaccacgaacatgctcagcaatgagacgaggaaacagagaaacaaagaaaggccacaatcaaaccttcggctcaaacaagcctgca

SEQ ID NO: 39736 - DNA, 201 bp, Bos taurus
gggacgcaaacctgcagcaccacgctacggagagggcctgacagcaggtgtctaggatctctgatctctgagtctgaaaaaataagacacttcaggagaaragcggcttcttcttcttcctctggccattcagctaaggcttctgaacattacacacaaaacagacctgaaaggtggagagattggggcacctgctagggt

SEQ ID NO: 39737 - DNA, 201 bp, Bos taurus
ctgtctccacgctgagaggtcagcgggggcgcagcctgcatttcctgggccccttctccagggctctgacctgaacgtggccagcgcccccgggaaggaartctgcgcacctttccactggcatcaccttgagtgtgacagcacttcaggctgtcacgggaggccttccttcctgcatgaacccggggatctccaagcaaa

SEQ ID NO: 39738 - DNA, 201 bp, Bos taurus
tcagacaactcagttgtccgctccatatacgagttctctagaatttgtgttccgtgattatgctatttttttcattacagtgtaacacacatactttacaygcccacatcttaggtgcacagcttggtggatttctcaaggtgaacatgtccctgccaacaggacgcagggcaacacagaacaccaccaggtctcgttgag

SEQ ID NO: 39739 - DNA, 201 bp, Bos taurus
cgggccagcatttgcttgtgccccctgttctttcttctttaactttccattttatcttggagaccacctcattggtccttagcagcgttgtgagggtttcrggtatatgatgaagggtccggccgtgcacacacgcgcgcgtcccttctcccccagcccccaggcggccccatgaccctgagcggagccccgtgtgctgtg

SEQ ID NO: 39740 - DNA, 201 bp, Bos taurus
cccacaggggtgtggccagggcttaacctcgtttcgtggggagaaacgccgactccccacttgggtggaaacagtcttgggacgatactagctgacactcyagcccctcacaggcctcagtccccagacccccaaacgggctcctggccccagatggcgcgggtgaccctggccccggcccatcacatggccacctggggg

SEQ ID NO: 39741 - DNA, 201 bp, Bos taurus
tagaatcttaaaattactagtaaaaaaagaaatgctccacgattgcattgcaaatgtgatattataaaaaatatactacaacctgaattggagacaagatrtttgagtagaaggacttgagctcatctcctctgaaaaataagataaaataaaataaaatttaaaaactccaccaaaatcacaactaaatattgaccaagc

SEQ ID NO: 39742 - DNA, 201 bp, Bos taurus
ttactggggtgaatggaaagctctgaggaagaacttaaaggaagtagagagagggaaggcagggggatatgtggtgggaatatgtctgtcctgcttatggrtatcagtaaggcctgtgtggcttgagtagcctttggtctttactctcagcacactagaagtcattgaagatttttaaacagagaagtgccaagatatgac

SEQ ID NO: 39743 - DNA, 201 bp, Bos taurus
aacttggaaacctcagaatacattaccctagctaaaatcaggtcacctgaatctcctttctacaactagaaaatacaaaaatgaataaaagagaaaactckctggaggttccatctttgtattgctgatcctgttcatagcgccaattgtttcactgtgtctcactgtgtgcactgttcactgaacacatggcatgcacgt

SEQ ID NO: 39744 - DNA, 201 bp, Bos taurus
gtcctttgtaattatgctaaatctattctgcctatgctctataaagggaaatacatagtctagatgacagcacatctgtttacaacatgatttactcaatrttttgagcctgtcgctgagacctacttgggggtgggggtggcaggtggtgggaagagctctttcaaaatggtaccgctcattgacagtgaacctgggaac

SEQ ID NO: 39745 - DNA, 201 bp, Bos taurus
catgaaggctgggagaaaccttcattcacactggcccacagctctgttcccatgactccagctctacttcccaccaaggcagtgcctgtcagtacatcctrgaagaacaagtggcctacgatcacctcagatccagctctcccaccaaagccatggggcacagcagaatgcattgggacactcccccacaaaagatgtacc

SEQ ID NO: 39746 - DNA, 201 bp, Bos taurus
attcaatgatgagcttgttaaaaattcatctccttacttgctatttgacttccctcatcctacgagaggacttccatggtggttcagctgtaaagtacatktttccaatgagggagacaccagactgatccttgagtctggaagatctcctgaagaaataaatggcaacccactccagtattcttgcctaggaaatctcat

SEQ ID NO: 39747 - DNA, 201 bp, Bos taurus
atctctgggcctggaaatcccctggagaagggaatggcaacccactgcagtattcttgcctggaaaattccatggacagaggagactggcaagctactgtygatggggccccaaagagttgaacacaactgagtaattaatagatgcaatctcaaaaacgacagaatgagctctgctcttttcaaaggcaaaccattaaat

SEQ ID NO: 39748 - DNA, 201 bp, Bos taurus
ctcagcctcagggagccttctgggaacctaggccagattctctgcacatggaagtcagaggtccccttggctgagtggagcccaggaagccacccaccccmacccagggcctttcttggaagcatgggtcctgaatcatgactctcccttgcctaaatctcacttgcccctaaacacctctaacacccaagtccttctcta

SEQ ID NO: 39749 - DNA, 201 bp, Bos taurus
aatgtgcaaaactgaaaccatggagagtaggactgaggggtggaaacggagctttcttgcgatttctggagcttacttggctaactggttaccaggcccargcaaagtgagcttacaggtgcgctttcagagaggaccgatacagcagtctgtaacaggaggtcagcagactgggcctcgtgtgtgagactcgggctgtgc

SEQ ID NO: 39750 - DNA, 201 bp, Bos taurus
gattttgttagcttattattagtatccttgaaattttgatgcaaagaacagaaatgaacagctctaaaacgaagtatctataatcttaactgcagggcggkaaagtatttgcctgccaaaagagataaatgatgttcttgtgtgcacttgaaacttacaaatggctgcagtaagactcaggatgataacagttgtgctcaa

SEQ ID NO: 39751 - DNA, 201 bp, Bos taurus
ctgtatgagggccactctgtagttgtggtgcatggacttttcattgcagtggcttttcttgtggagtacgggctctaggctccaattcagaagttgtggcrcacggactcactggccttgtggcacatggaatcttcctagaccagggattgaacctgtgtcccctgcattggcatgcaaattcttaaccactggaccatc

SEQ ID NO: 39752 - DNA, 201 bp, Bos taurus
tatctgaatacctaactaaagcagttccacagtgccattggcggagatcacacccaagtataacatggagactttcagtgctatcttctggaagaacagtyactcttcaaagcatgggatttcaaaagggccgtttacacgggcaaattgttaggacttccctggtggtccagtggttgggaacccacagtgtagtgctgg

SEQ ID NO: 39753 - DNA, 201 bp, Bos taurus
tttgaaagtttccacaccatggcctcaggttgacatttgtgtcctgaggaggcagaagattgggaaactaatagaaactgcttttggggtttcagatgctsagctgtgagggccattaagtaatcgtcagtgagtactgaaagcaaaagctgtagtcagttcatacgtaagtcaagttcctgtatacagttatttgctaaa

SEQ ID NO: 39754 - DNA, 201 bp, Bos taurus
acctcagtatcgacctgctaaatgtctaacacccaccttacattttcaatagtgcttttgagctactatcaaccacaacaaaatgtcagtgatcgaaaaarcctttatatggttgtattatgtgaataagtctcattatttgatttgatgtaattagctttcttgatctgtcacatggctaagaaattaaccaatacatga

SEQ ID NO: 39755 - DNA, 201 bp, Bos taurus
cttgtttttggccacagtatgacgtttacccttctgaatgctttactgctgagaagatgggaacctaaggaacttagaaattcccgctctcctggcagagyggaaagatggcccagaggctcaggagcacagggctttggggccagctctttgtctgtgccacgcatcctgggctcggtgcttccccacctgcagcctgtc

SEQ ID NO: 39756 - DNA, 201 bp, Bos taurus
atgcttattgtctagacgctttctgtcttgcaacgcttcccctttcctgtacctttgactagagagaggctttcctgggggccttgtctggcctctgggtrcttctggggggcagtttctccagcatcccgtccagggtatgggagcaaaagaaaaccaggggactggcctctgtggtgttcctggggtccaagactcgta

SEQ ID NO: 39757 - DNA, 201 bp, Bos taurus
taattaaagtataattgatttacagtgttgtattaattttataaataaatatgtacattgtatactttacatatacacacacacacacatacatacagtcytttttacattcttttgcttatgggtcatccccagatactgaatataattccctgtactacatgatgggaccttgctgttttttgtcctatgtataaaagc

SEQ ID NO: 39758 - DNA, 201 bp, Bos taurus
aggccagtcagcacggctgtctggtgtcctgccagccacactgaactgtgtcggtgcatgtgtgcagtgggtggaactggggtctggcagagctgggcacrgagcagggtcgtgatgaagggccccgggagcaggggcactgaggaaagggttgctggagaagggagacacaaggaatcgtgcagccagtgttttgggaaa

SEQ ID NO: 39759 - DNA, 201 bp, Bos taurus
tggaggtagggcctctaaggagagaggattcaggttaattaggcacataagggtgagattacaggatcagtgttcttatgagaagagacaccacccaacgyacacagccagcaagatggtggcccaccaatagggggcctcaccagagcccaccaagccagcacctcaccttggaccactagcctccacagctgtgaggaa

SEQ ID NO: 39760 - DNA, 201 bp, Bos taurus
cagtaagctggttcttatatagtgggaagcattgattattcctgtgctgctgtttttctaaagacaaagcaaacaggcccctggaaacacaggacttggtwacatgttgagcattggatctgtacatgtgctgaggagagcttgaggcatgacctgatgccccaggctctgacggtggccattaaggctaaagaataaggt

SEQ ID NO: 39761 - DNA, 201 bp, Bos taurus
attcccaaccaggttcagtttgagtatctgcattgctatggccttcaaaagcattgcctccaaaataaccaagacctgaagatttttaaggctgctgggarcttcttgagaagccagaggaggggccagctgggtccggcttcccctgggtccttcaattcacaacagggccaggaggcagagactaaccatgtgtgtttt

SEQ ID NO: 39762 - DNA, 201 bp, Bos taurus
tcagtcagtactgtgtttcatgagccatgctgcaatgtttaggactgtgatccttggattaaagacctgggttcaattgtacgcctgctaagttgtatgcrtatggccttgcatgtagtattaaatatttttatataacaaatatttttaaaacatacctgccatttatttacttttgagttcattttagatttaaaataa

SEQ ID NO: 39763 - DNA, 201 bp, Bos taurus
ccatgagtgtgtgacaggtttttaaattctgagtggaatcacatgataccgtctacagttcctgttgcaggcagaaatcatttcaggaggaggtaaattaraataattgtctttttctttgctacctctcttcccccctggcagagttcctgtgactcccagatgtgtaatttcatgggggaacaggtgtgtctgctattt

SEQ ID NO: 39764 - DNA, 201 bp, Bos taurus
taaaactatattcatgaagcatttatgagcaccagtaagaagacttcaactataggacattcaaaagtcaattgaaattgttctttgcaacagaccattcygggggacagttttccctttttcaagtcacacatggctacggtattaagaggctcttagggtttctggaatctggagtttaccacactctctgggatggtt

SEQ ID NO: 39765 - DNA, 201 bp, Bos taurus
tttaggtagagatgaggaagggaaaaaaacaatgtttattatggaattcattgtcttgtctaacgacttgttaaatagtaagagatgacttctaaagaaayaaggacagtgtagggaaattaacaagatagtgcccgtcaggctctcaccccagctctcatgccctcttgccccatattgtgtaaaaaatgactttgcatg

SEQ ID NO: 39766 - DNA, 201 bp, Bos taurus
tggccccactcctggctgctcgggaggtttgcgttcctgtggcctgctccctgcaggacccctctcaccacctcccagccccctggcctggttagcatcayggctgccttccagccagggagcctctcttctgtattaacatcagttctcaagaatgagggcccctgccacgatttctttgcttggaatatgatgttttta

SEQ ID NO: 39767 - DNA, 201 bp, Bos taurus
gtagttgcggggagtaggcctagttgctcttaggcatgtggatcttagttccctgaccaggaatctcatccacgtcccctccattgcaaggccaattcttractactggaccactgggcaagtcctggtccttgccatttagaggggggcggagagagaccaaggaaaggcccagggacttcttaccactttggagtgaag

SEQ ID NO: 39768 - DNA, 201 bp, Bos taurus
ctcctttcttccccagtgcttttctgcccctgcagcatgaggtggacactggggtccgcttaacatttatgaattcattgtttaccatttccagggaatcmagatttacagggccacccctgagaagtgggagacagaattcaaaggataaatatctttcattttcttctgctgtgaagacagcacagtaagtcctctatg

SEQ ID NO: 39769 - DNA, 201 bp, Bos taurus
gctgtaggattcacttctaagatcatgcttgtggttgttgttagcagaccacgtttcctctatggctgttggctggatatttcagtttcttaacacatgartttctctcaacaaagcagcttactttacccagagcaagaaatccaagagcaagaaagtgaatgcccaagatgaagctatgatcttttataatgtaatctt

SEQ ID NO: 39770 - DNA, 201 bp, Bos taurus
attggagcaaagagacaggaaatgtcaagcttgataggtcatgctgagaggaaaaatgtactctaaaaacatgtgctaccatttgacttactggtgttaayttgatcttatattcaacacaaatacagtatgtctaactgcgatcatatctaaattgttattctaccaaacttaaacatccgttgctcaatggagcgccac

SEQ ID NO: 39771 - DNA, 201 bp, Bos taurus
ccccagtccatatgttctaccaacctcccagagtccttggtactggaatccatcttggctgagcagtgctcactccatcaggaatggctccaagtcagtaygattggccagagagagacaacccagaaactaatctcattgccataaaacctgagactgtgagccacatggtagagcagttctcctgggttcccctgacct

SEQ ID NO: 39772 - DNA, 201 bp, Bos taurus
caactgtatctaactcgagcccagggccacctgcaatgacttagtcttcagactgttgatagtaaacagagaaacaagagccagtctcagcagtatcggtkatgtgaaggaagcagcagaaaggccctaagggaagagcttccatatatatatatacatatatatatgtatatatatatatttagaacttacttttcaagc

SEQ ID NO: 39773 - DNA, 201 bp, Bos taurus
aagaaatctaacctatactagtagttcaggaatacttttccggataaagatatgcttgtgttgaaactactgcagaaaaaatagtggccaatttgagttcyaagagatgatgagatgatacgtttaatattttatacatatggataaaacagtatctacaaaagccagtgaccagctcaagacacttaaaggaagcttgtg

SEQ ID NO: 39774 - DNA, 201 bp, Bos taurus
acacaagcttgaataaaatcttttctgaaaaaagatttatcaagtatgaaattagcatgggaacctaaccaacaaaaattcattcactgtgccaagcaccmtagcaagcaccacgggaatatgactgtcaaaacaggttccagtggtggtgggaatgtgatttggcatgcaatagacctcactttaagtcttccattgatc

SEQ ID NO: 39775 - DNA, 201 bp, Bos taurus
cattgcttatcaatttaggtaaattcagagtggccgttgagatatgtgtgtttgacctcatccttagagacagaaaggttaaaaggaaaacaaaagaaacrtttgtgctaatggccctgccaagtacttattgttgcagcaccatagagtcttaatataaatgggttctgaagatgtccctttatagcaaaatgctctaga

SEQ ID NO: 39776 - DNA, 201 bp, Bos taurus
taggcaaggcgtgagctaagaggccggaagaagacccgaggagctggaggagctgcagacgcatttattctcttccggctgacacagcagccgtaccagtmttctctcctgactcacgcggccgcggtcgcattcactcacgcggccgcggtcgcattcacgctgtagtctcgcctctcatggccaacccgagggacacgg

SEQ ID NO: 39777 - DNA, 201 bp, Bos taurus
caggggatcttccctacccagggattgaacccacatctcttgcatctcctgcattggtcggtgggttcttaccactagtgccatgggggaagcccaatgaytagagtaagtgccatggtaaattttctcaaagagacattcaaatgacctagtcatgtttattgaaaagaccatcttcctcccattgctctgcagtgccac

SEQ ID NO: 39778 - DNA, 201 bp, Bos taurus
tgtaggaaaaggtagcaaagtcaaccgaagagagaaggcaataccaacctgggaatctcccttaccggtggcctctgaaacagcttgaataaatgaaagcrtcaggttggtccaatcagaagctctgttgttgagtcgttttctgtgctgctcgttaccgtccccagcgggaggatctgggtttcccaggctcttcagaga

SEQ ID NO: 39779 - DNA, 201 bp, Bos taurus
gatgggggtcaagaatcttcattccccggccccccccaaaatcctgatattcccagtctttctctctcttttttcagtcacactgcacagttcctcagacractgagcacaggccacagcagtgaaagcactgactccaagcacgggaccactggggtcccccccctttacgttctcctttgaggcccccaccgaaactgg

SEQ ID NO: 39780 - DNA, 201 bp, Bos taurus
aatttcaagatcaccaagaggaatcaggaggtgatccatcagcattaagcaatcacgagggattctgtcggtgacagggttaagatgactataacataaaygggttacatgagatcaggtaacagaaggacttcataggaggtgaggtgtctggccgagaaaagttcagtgtaatgagaattcaggagggtttctattgca

SEQ ID NO: 39781 - DNA, 201 bp, Bos taurus
ctgctggtagaggtgcccgttcctctccagctctgttcctccacctgctttggcagccttcctccggggctccccttgagagctgccagcagggtgtgacrgggaagaaaggccaaagggaaggttagcggtttgggcgattggaggatatggggagattctgtgggtgatggcaagattagagaggttggagaggtggga

SEQ ID NO: 39782 - DNA, 201 bp, Bos taurus
gtgacaaatcctaatcacgggacacagggaccagtggccagtgacaaggccgtgacccatcaactgtgtagaaaggaattttcacagaggtgggaagtccrggtagacagacacacaggtcggccaagagagaaagagacacgccctcgtggttgtttgactcacttctgtggggcattgcttccaggttcctctcggcca

SEQ ID NO: 39783 - DNA, 201 bp, Bos taurus
acacatcccgagctgtgttctccccagtggccagccccgaagagacaagtttgccatcaatgtccacttcctgcttccctaggagtcaccatcagtggccragacaccctgtccaacttcacccggctctttctctccttcctatggcaggtgctcagcacctctgggagcctctgtggccttgagggaggcagaaatggg

SEQ ID NO: 39784 - DNA, 201 bp, Bos taurus
accatgaaggaaaccaaggcatggatgcaatcagtaactgcacacccactcagtgatggcagcgttggaagtaggatctaggccctgcctccttcccactycactaagatgagaacatccatttcctgacccacagtctcctaataccttgttgggctgtgcacacgaatgtgcccggccccccgaattcacgtaacgcct

SEQ ID NO: 39785 - DNA, 201 bp, Bos taurus
gcccctcacttcatcactctgccccaagtctgcctggggcccttctcctccaggaagatatcctggtccattccagcttatcaccaccctccagtctgttractgcagagggcttttattatctgcatctcttattttatttagtgcttcattatactccattgatgtctcagctttgttttaatctctaagagttccttg

SEQ ID NO: 39786 - DNA, 201 bp, Bos taurus
gagggggcccgctgctagctggcgccgcgagcccgctccgctgaggtaggccccgggcctctcaccgcctcatcggggtaaactctctcagccgctcactsgctctcgcgctcccccccctcccacccccccggcgccgccgcctccgcctccgccgccgccgcctctagctgcgccgccgcctccgcctcctcccgcgcc

SEQ ID NO: 39787 - DNA, 201 bp, Bos taurus
atacattgtcaatagtagtaaaagaaagagcaatgattaacattttgcttctggtgattgataaagcacaaacttgtcctgttttatctcaggttctgcckttagtctgaaacaaaattggcatgtggctgtgaatttgaattaatggcagtgttccaatcttgaatattttgcacctctcacacaaaatattccagtgtc

SEQ ID NO: 39788 - DNA, 201 bp, Bos taurus
agatgtatgtcctgaacaaattcctaagaacctgttaaggtgcaaccactttaaaactccttgtgtgttttccacggggtattgactcagcccggccagcrctcagtacttgctaggagcacccatgggaaatacaagagaagcggaagaggtgtggtaggcttatgtcaaaggaccaggaacctccttggaccatattta

SEQ ID NO: 39789 - DNA, 201 bp, Bos taurus
ggcaaatgtatccccaaatattaacaggttttgtagttcttctcagagaatggggtaaagacacctcaaccatcttggctggacccaagctgagaggacaygagccctggggtggaggcctccacagatctcctcattgtctgttggaacatgaattttatacccccactaagaataaacaggattaggaatttaatgctg

SEQ ID NO: 39790 - DNA, 201 bp, Bos taurus
tagcaagatatgggctgccgaagcctggagcgaggggcgcaaaaaggaactcctggaggaattaaagttgggcagaaagtgccacaggggtcaggacctgygggcctacaggtgggagtattcccacaggggatatttttggacatagagtagggtgagagacttggcagcagaagaacccagagttccttcccctgtctg

SEQ ID NO: 39791 - DNA, 201 bp, Bos taurus
tggacgtgccagggcctcacaactgtgcctctggtgaactgaaccgcgtaccctcccggctcgtcctctagatccaagcagccttgatcagctctgaagtmctcttccctcctcgtggcctctcgggttgtcttcctgggcctgtgtcctacggaaacctccttaggatggaagtcagaggtccggtcggtccgtcctccc

SEQ ID NO: 39792 - DNA, 201 bp, Bos taurus
aacttcttcaaacctcctgagtaccttttagagcagctgaatagtagagaattctgtgtgaactcttttctgtagcatttgaacctattccttgaaatttwttgtagctaactcccaggatgtgccgggagttgctgggcatggcacagatggttgtttcaatggtgttaagagttttctgatttttagtccttgagaaac

SEQ ID NO: 39793 - DNA, 201 bp, Bos taurus
aacagaacccctgagcgtctggtgcttgtggccatttctgggccagatgcagcctttggttacaccctcctggtgctcagcagacagggagtgggattgtyctgcgggagtcctgggcctgtgtgtcctccccgggtgttaccttcacctgatcagccggctccactagcgggctgccaaccacacggccgtctgtttccg

SEQ ID NO: 39794 - DNA, 201 bp, Bos taurus
tctgatatgaggctagtgatacttcctttgcagggctttaaggattggaagcagcctatataaagcacttggcatatagcggtagatggtagcagttattrttgtcatctgttgagctatatcaggcgcagccaaacagcactgtgcactaaaaatgaaagatcctgccatagggaaatagatctggataccaggctcacg

SEQ ID NO: 39795 - DNA, 201 bp, Bos taurus
tcagaaaccagagccaacttggcagccctgtcactgtgggaaaggaataccctttcctggagggaggccagcgtttactccctttacagctgcagcgtgcrgggagggaggtgccatcccatacccatccgtggaggttttgcaacccgatgagtgaaccctttgggactcagggctgagcagcacctcttcctgggcccg

SEQ ID NO: 39796 - DNA, 201 bp, Bos taurus
cacagagaaattctggctgcgggccaggccctctctgtcactacctccctcccaaaaagaatgccaagcagtggctctggctttctggccactgaacaaayccaaatcaaagcttcccatttgggatggttggtgaggagagagatccccaccagcagaagggcctgggactgacaacaagcagaagggaggagaggggtt

SEQ ID NO: 39797 - DNA, 201 bp, Bos taurus
tttcctctttaaggcaaaaggcttgtaggttttgcctctttactttgtatttacctttaaagttccatttgttcacctaccagtgtttaccaagtccttayatttgggatgctttttctataataaaatgttaccatttgtgtccatgttgttttgttgttgctggttttagagtaggtttggagccagggcggcacacag

SEQ ID NO: 39798 - DNA, 201 bp, Bos taurus
agccagttacccctcaggcagagcctcctgacccttctactctaattgtctgtgacctttgactccaacaaagcaagcccagagtgggtgtggggttccgmggccccgggcccttcacacacgctgctcaaggcttctaaatcctacctgccctctttagagctttactcaagtttcaccgcctgcacgaagctgcctatg

SEQ ID NO: 39799 - DNA, 201 bp, Bos taurus
tctatgtgctgctcctgctccttgaagccctcttgcctcagagaccagtatgcccctctctctcctttgctcagggttcatctaactgtcatctcctcggrgaggccccctccccgaccacctcatttaaaatgtcaccttgtccctctctatcctcttattctcctttgtgacacttaccaccactggaaatcgttattt

SEQ ID NO: 39800 - DNA, 201 bp, Bos taurus
ttaattctcatctccagggtaaaaacgtcactccagtctcagtcccaaggtggcaacgccaaaacccatcacacccagatctcagccccaaacttcagackgctcctgcaccccctgcagacgtcacagatacgtccctctcactccccagcagagcacattgccagacaatccctcaccagtgacctaaccttggtcacc

SEQ ID NO: 39801 - DNA, 201 bp, Bos taurus
cagtgctatctgccaggccgtgtggcagagagccccacatgcccacgggcccagacatccacgtgtggatgcgtccgcccccatgcagtgggaggggacaygtgcttgcttgtcatggtgttcctgctgagtgtgtgtgtgcgtgcgtgtgtgtgggtccctgcattaatcagccagcatcgctgctggcgtccttctggc

SEQ ID NO: 39802 - DNA, 201 bp, Bos taurus
catcactggcaggttcctagtagagcaggattatctgctaccttgggcatttacttcagacaaaatcatggaactgagctgggagaatataactcagaggraccagatctcaggtcctctttgttcctgtctggtcaaatccctgttggaatctgaagtttagaaaaccatcataaggcaaacagagagtcccacaatccc

SEQ ID NO: 39803 - DNA, 201 bp, Bos taurus
acacccctgcccctgtgtgtacagcctcctccattagcaacatctgtctctggagtgctgtatttgttaaaattgatgaacctatgctgatacaacattayggttcactcttgatgttgcacactctgtgtatttggacaaatactagattggtgcaaacataattgcagtttttgtattgttgaaatttgccatttgata

SEQ ID NO: 39804 - DNA, 201 bp, Bos taurus
gcccttgtcaggccccagagtccagaggcaggccagagtcggggagggctcatccaggaatgagagacccgaggtcccatctcccagtttccatgtttttrcctgatggggcattcctggcccaacctccgtgaacccagccaccaggagataacaggtaagagtaggggagaggaagatggaagggagcagggtcgggga

SEQ ID NO: 39805 - DNA, 201 bp, Bos taurus
ggtttaaggggacagatcattctagttttgcattcattgcgggatgttggattttagtctgagcaagatgggagctatggcagggttattaacaaaggagkggcaggatttgattgtagtgtatcaggcttgttctggctctgtgtgaggaattgattgaagtggggagggttccacagcatccctagcacctggcactgt

SEQ ID NO: 39806 - DNA, 201 bp, Bos taurus
gggacagggcgtttacgtgccaggagtgtgagtccagtgcgtgcacacagggacatccccgtgctcggggtcagggccccaggaggccaggcctgggaacygatttggactatcatgccccaccatgtggcagtgtgtgtcttgttagagatcatggcttaactcgctgtgctccagccagcctgcaggctcctagtggcc

SEQ ID NO: 39807 - DNA, 201 bp, Bos taurus
cagaacttgggtgtctcagggaggagaggatctgttctggcctgtctccttggcttgtagatggttatctctccctgtgccacttcacatcctcccaggtycactgtgttagggcctacctttatgacctcattttaactccattgcctctgtgaaggccctatacccaaataagatcacattctgagatattggaggtta

SEQ ID NO: 39808 - DNA, 201 bp, Bos taurus
ctaaccgctgtctacatagcatctcttctgggatagagaactctagtgacctcttcctgcctcctttcacgccccgtctcctcattttatcactctgtgayaattactgacagatcttgggtctcagtatattagaagacagtcatgatcatcagggaatacttcctgagggaggctttcattaattgtaaagtttactga

SEQ ID NO: 39809 - DNA, 201 bp, Bos taurus
gtttgatgacttgtgttctctagagccatgtattacagtgttacaggttcagagggggaaagttccagacgtacagttaaggcccagctttgtgttaattytcctgcatcaattacattgctcttcccttgaactggatgctaccccaggattaattttcctcagaatctggagtaattggccaaaatactagggtaaaat

SEQ ID NO: 39810 - DNA, 201 bp, Bos taurus
gttctggttcccagggggaactggtagacacggccttactggcgccctctactcaccctagaggctgctctagtggccccaccgcccaaggcagctgttcmcttcatccagatgtgtctgcttggtcttgaagagcaccggctccatggagatctcggcctgactcctcaccactggctccgcagcaagacacagctggac

SEQ ID NO: 39811 - DNA, 201 bp, Bos taurus
tgctatattgcctactgttctgtaataaaattcatagactgagaacctactacttataaaaaatacattagctataagggagagatttttaaataatttayaataaaataatatgcatttcaaccaaattagaaaaccaaactgtccctataaattttcataatgccttctgagaagagagtccataaccgtagcctctgc

SEQ ID NO: 39812 - DNA, 201 bp, Bos taurus
caggattatagtagaggagagagagagatgagaaaaaaattaagcaaaaacttcagacagtttgagttctaatttgtacatcttggatgtgggtgggtcarcaggttggctggcagctgaaaggtcagtgtgtgtctttctgttctggaatagaccaaagtagtatatcaaagaaaatttcagctgtttatgggtgctttg

SEQ ID NO: 39813 - DNA, 201 bp, Bos taurus
tgactgaactgaactaaactgagggtcttccctagggtccccctctttccagggaccttggtacatttctgtctcctgctcagttcagaagctacaccttyctttggtcattttctcaacctctgagtgagctttgttctagagttgatgtttcttccctctggtctctgaaatgtgtgatgactgtattcctggcctccc

SEQ ID NO: 39814 - DNA, 201 bp, Bos taurus
ttcacagatgagggtttgctctgaaatggccccattgtgctctgggtggcgctgaggaggtgggagtggtgtggagaagaggaggcggcgttccgagcccktatgatgagggtaatctggcctcccactgccgggtccgtcaacaggcctggcatggcgccttcctccttggcactttccaggccggattatggttcagtc

SEQ ID NO: 39815 - DNA, 201 bp, Bos taurus
tagccctggggaagccaagtgggggacgagtcacaagtgtggctgtagctgctggggagattcagacaggaaccccatggccaagaggcaagctgtacttyccccttccaggtctttgattttttttcttgaaagcttggactctggctgccctgacccacaaatcctgcagggtcagggcctgacaggtccataaggagg

SEQ ID NO: 39816 - DNA, 201 bp, Bos taurus
aagatatatttaccctacaacccaggaatttcattcttaggtaagtctagagaaactctaatacacgtgaaaaaagaaatatccaagaatattcatgatarcatgttttttaagagctagaaaactacccaaatatctatcatcaaccagaaaactggtcacataatttgatatttctgtgtgatgaaatggggtgaaaaa

SEQ ID NO: 39817 - DNA, 201 bp, Bos taurus
gtggcctcagagaagacatttccttcccggacctcaattttcagatctctaccctgaagctagatgctttccagctcagggcttatggttttagtcttggrtgttcagaaggggccccaagaaaaggaggaagggacagacttaagagttcctggggaggaggacaccctcaggaacataaacactcaggagcggtggagc

SEQ ID NO: 39818 - DNA, 201 bp, Bos taurus
tcattcctttactattgcactctgacagctctccagcctcttcggaccttaccccattttctcacaggtgtttcttagattccaaggccaggttaagcatrcatcttgcagaacctagatcacatttcttcagtgacaggattcaccttcacatcagacacttgaagtgatcctacaaaaactcattttccaacttgctga

SEQ ID NO: 39819 - DNA, 201 bp, Bos taurus
agcagctacctcaaataagcgttcttacttgaaaagaaaaggaaaagaaagaaaaatgcagtgtttaggaggaggtggccgcgttctgatcttcaccaccyctctgcacttagggaatgaaccacaggtgggaagtagctttcataagtcaattcacctgagtcagtttgagtttggccgcgttccccttctggtcctgag

SEQ ID NO: 39820 - DNA, 201 bp, Bos taurus
tgaaggacatgagtgtgggaggagcaggcagggggccacctctggagaaggctccagagaccacagggagcagacaggacaagcttagagccataatcagygaagcacatcagggcccaggaggccagacaaagagtaggtatcgggagaaggaataagacgggggagtaggggttggtgctccattcattcattcaatca

SEQ ID NO: 39821 - DNA, 201 bp, Bos taurus
ttccaggagcagaagctctgcgaggctggggagagagcccagggaggcatgaaaacacagcggtctggactgcaggccaggctctgccagcagttcacttygaagattgccctggggcaaactgccaaaccctttctggatgccagcttcctcaaccataaaatggaaccgctggtgcttctggccctccctctttccagg

SEQ ID NO: 39822 - DNA, 201 bp, Bos taurus
gtgtgactagtgacagacccctcggatctctgaccacaggtcctgacacacctacctgactagtcctttttgtggtctaaatacttgtctgcatcttgatsggagaagaagtggtcacaggccaccatctgcttggaacttctctcctcttctctgccctctggtgctttcagtctgtatccccatttatagattccagga

SEQ ID NO: 39823 - DNA, 201 bp, Bos taurus
gggccccccaaaccaagggacgccccacctctgtcaaattagaggagagcagaggcaaaggagcaggcaactcagagggatcacccaggtcgcatgacccrttgttggcaaagctggccaggacttaggtttccagacccccagcccagaggtttctccactagccactctccatcggccttctcgcccctgcctctgctc

SEQ ID NO: 39824 - DNA, 201 bp, Bos taurus
cagtaattaacgctacagatttaccctatatccctggaggccacgagccattgtaataactgagatgattcctcttcctccctggacagaaccagcctgtratcccagggaccaatctttccctgattgaaatgttcctgctctgtttcagtgggccccaggagagaaagctgccagcccttttaaagggaggtcagaggg

SEQ ID NO: 39825 - DNA, 201 bp, Bos taurus
ctgcctgtggaagacatgccttagtgagcaactccaccaggaagccctccatgaattgctccctctcccttccccctcctttgaaatctggcctcctgccrccgtgggctctcacataccccttaggtatccatttctcctgggactcgccagagtttactgaaatcatcctgttgcacatgtggccccagtgaactgttg

SEQ ID NO: 39826 - DNA, 201 bp, Bos taurus
ggccatggcaggattttgagcagaaaagagatttaaattttaataggatccctccctctattgtgtctagaatagactgtgggggtgaggagtaagtggaraggcctgagaggtgataaagcaaagagtggtgaagagcccctgaccagcgatggcagagtggctggtgagaagggacccactgagtatgggagcagcttg

SEQ ID NO: 39827 - DNA, 201 bp, Bos taurus
tgagatacctgaggcccagggagattaaggacttgtcccgggtggtgggctcatccacagtgggaggaagaccagagccagggcctccttcaggccctttyctccacagtcactcccaacctccatcctggggagcccagagtctttcctaggatatctgtaaccccagggcctgcttccccctggagtctgtgctctcta

SEQ ID NO: 39828 - DNA, 201 bp, Bos taurus
tgtggcccctagtagaatgctcggcacctaatggatcctaaatccataacagacactaacccactgaagccagcacggaaacctgcagctttgcaaggacrcaaggccaacaactaaacacccttttcaatcagatctgcccacaaagaatggtgtttgagtctgtatcacttaagaactttcaggtggcagaaaacccaa

SEQ ID NO: 39829 - DNA, 201 bp, Bos taurus
gttccatggagtgctggaggataagaggtttattatccagttgttgcaaccagagtagagatgccctggaaagttcactaaacacgtgacatagcaaggaygaaacaggaagtgacttatgctgccacccgagattgctactcttgggctcacaggcgccaccctcagggcttctgcccacccttggcaggcaccatatgg

SEQ ID NO: 39830 - DNA, 201 bp, Bos taurus
acaaagtcccccttggtgatgagggctgtaatggcggaacatgaacaggtgggggcgctcaagagaaagcggtcacgccgccccataaggcgaagcaaacmgtccagatggagatgactgatgcttaggctgagtgagcctggaataaagacatccacgtagccaacaagcagaaggggtttcctgagcagaggaagagca

SEQ ID NO: 39831 - DNA, 201 bp, Bos taurus
catcactcagaaaatttccaccacacgttcatccccacgctacaggtctttgggagcagccctgattccacattttcatccctttggccatcctggaataygagcaataactcagcctttgtcacaggcggggacactgaggaccatccagagatgctaagtgatttggccaacatcatcacacagtgaatcgaggtctga

SEQ ID NO: 39832 - DNA, 201 bp, Bos taurus
cagggacaaaaaggtgggacttggccacagtcaagtcgccaactagagagtgtaccggtcaggcggagtgtactgccaaggcgcgggcaggggtgacaggraaggcggccccttaaggaaggctcacccacatcttttttggggggttggggggactaggggaagaagtagagaggcctcccattctctgtctcctaccct

SEQ ID NO: 39833 - DNA, 201 bp, Bos taurus
agttggaacatgacatggacagactggcccacatcttcagttattacattagtgacatcgtggagcgtgagtgactattgtgggggaggaaagaggtgtgstgctgggcccctgagggtttgtaacagaaggggacctggggtactttaaaatgcacactaaaagtgacatccttttagtgtcattcatccttaatatctt

SEQ ID NO: 39834 - DNA, 201 bp, Bos taurus
gaggggtctgctccagacagactcgaggccaccttctgccctcacaactcccagccccggggcaggaagccccgaagcctgaagaaggagcccggccacayagcacagctgtgtccaggctgatgcagagtgagaagcccatttgcagccacgggggactgtgaaccccaggctcgcctgctggccccgcagcaagaacac

SEQ ID NO: 39835 - DNA, 201 bp, Bos taurus
agggcatgtgggagacaacctctaggagcctaactggtgagagctggtcaccaccacccctgcccctcatgtgatacaaggaagaggcacttagatagagygggctccctgttgttctggtctatatggctttgaggcgcttggtcttcagtaaaggagctctagttttcgtcccttccagtaagtggtgatgcacttctc

SEQ ID NO: 39836 - DNA, 201 bp, Bos taurus
agcgtcaaggaaagtttccttcccagatcctgggtgagacctgtcagctgagacaggtgatcatgtgaggagcatctgcaaaagggcctagagaggaggcrtcctcttctgggagggactgggcaacctctgggagggtctttccatagaatctgggaggcaggaacaatgaaggagaatagcagtgttcctgccctgtgc

SEQ ID NO: 39837 - DNA, 201 bp, Bos taurus
acaaatagggacgggggagaccgcagcccaactcgccgcgctttggatgaggaggggactcggtttgctggggtcgcatctcggaggttccggggccagtrgtctcctttccttcatccctgggtcggctgggtcatacgagaggaaaacttcttggggacttgagagcgtctagaaacggcctcctgtgattttgtgcgc

SEQ ID NO: 39838 - DNA, 201 bp, Bos taurus
gccaggatttgaacccaaacaactagctccagaacacactctttcctgcctacattgtgatgttgtcccgtgcttagcacagtagtgaaccacagtccccrgtacagaggcctggcctgatggttctctgggctccgggagatgggggttcttagggccatgtctgaacttctccaggagcctggggtcccagccagtgac

SEQ ID NO: 39839 - DNA, 201 bp, Bos taurus
gggatagagactgagaagaggggtgtgtgtgtggggggggggggggagggggttggttaatggtgcagggctggggtctgcgcttagggaggggccgcacrtgcaggagaggaaagagacagtggaggctgccctggagacaatgtccaccccctgcttacgtccttccacttccaatcttggaggcggatgaggccaagc

SEQ ID NO: 39840 - DNA, 201 bp, Bos taurus
gggaaagcctctggtcatctggcctgcagccctgtcccacctctctcctctgcctttcacttcatgctgctggtggagcgtgtcagcaggagcctgaccgrggcccagtttgttttttgctggaatcggagggaggaggggcccagggggagtggagggcacgacctccctgttagacagtagacgagcaggagtgtagca

SEQ ID NO: 39841 - DNA, 201 bp, Bos taurus
tagtcggcccagattctaagaagctgagaccatgatcccaaggctccaggaggatttctgagggtctcacctttgtccctttgtaggagaaggtgtcaccrcagctcagtgccagggccagcctcccgtggctcatcctctgggcgctctcagcctacatgggccaccctctgtgtgccgagctcctccaggcctgctctg

SEQ ID NO: 39842 - DNA, 201 bp, Bos taurus
agagacttgacaaaagacccttggctgttcctagttagataagtttccagatgttgcaagggatttgagtctcttagcaatttttactccagtaattttayctttctaatgccacctgttgtctgattgcagacacatggaacccctgtgctgtactcgaccccttcaaaaacagcctccagtctgtgaccatcacaagac

SEQ ID NO: 39843 - DNA, 201 bp, Bos taurus
agacctcatataaaatttaagaacaacacagtactttttttttaagattttttttaaaatgtggaccattttcaaagtccctattcaatttgttaaagcaytgtttccgttctttgttttggtccactggccacaaggcatgtgggatcctagaaccccgaccatagatggaacctgcacccctggcattggaaagccaag

SEQ ID NO: 39844 - DNA, 201 bp, Bos taurus
tcaggatggggaagtaacttggtcaaggacaggcagctcataagtggcagagctggggtttgtagccaggctcccgggtccaagttctattgggccatccyacctgcccttccacccacgacctagaagcttttccttcttccctcccaacatcagcctgcagaaccacctgcatctcctgtgtctgcctctctgcactcc

SEQ ID NO: 39845 - DNA, 201 bp, Bos taurus
agatcagggactgaactccttgtctcctgcactggcaggtagattcttcaccattaagccaccagggaagcccaggcctttggcttttaactcaaagtggratgtgagcgtacagggcagtgagcaggggactcattgacctgacacagggtttcccaggagctcctgaaaccactgttaccaggcctgtgctggggacaa

SEQ ID NO: 39846 - DNA, 201 bp, Bos taurus
ccatcagtaggaattgttatagacatcataaaatattttaattatagaattaacacatatgagtgtggaaaatgaattattatttggggactctctgctcrgaaaaatgatcacttacccgatggcatcccactccagtattcttgcctggaaaatcccatggacagaggagcccggtaggctgcagcccatggggtcgct

SEQ ID NO: 39847 - DNA, 201 bp, Bos taurus
ttttttctgtgtctggtagagatgcagacttgaaagtggatgaacattagaagtgttttcagtgatctttggagtttgggtgttatttttccttcctcacwggattgttaggataaaaagaggtatagtatagaaaaacacttagggaactataaggaatttttatatgtaagattttttaagccgaatactcagtcttaa

SEQ ID NO: 39848 - DNA, 201 bp, Bos taurus
gcctctgtcctctcgcaccaatgaggacagggcacaactcttaccctaacactcgccctgaccatgctcctcgtgtttgctggatcttgtatccttctctktcttcatttactctctcacgttgcatgcctcagcagattcctgaggaaaggtgcctggatgttaaattttccatgtctgaaaatacattgcttgtatccc

SEQ ID NO: 39849 - DNA, 201 bp, Bos taurus
tagctgaagaccagataggagtctttccatcgatccactaaaaaatacttatggaagttaaacctgcaagtcaaaaaagctcttggttaatggcagtttarttaaacaagactaactggctcctactagagccctagtgaattcgtttattaaacaaatatttattaaaggcctaatttatcaagcaataagttttaaaca

SEQ ID NO: 39850 - DNA, 201 bp, Bos taurus
acatagacaaaactagagatctcatagcttcactttaaaacttagttatgaatcagttacaatataagcttactagttcataagtaagttggaataaattmaatttgcttgctaagatgacaaaggctttattgcttgtggaaaagacttttaagatttgtatttgatcttgataaacccttaaggaggctatgaattaga

SEQ ID NO: 39851 - DNA, 201 bp, Bos taurus
aacaatggaagcttatgctccctcagttctggaggccagaagtgtgaaatgaaggtgttggcaagcttggttccttctggaggttcttcaagagtctgttycaggcctctctcccagcttctggtgggtgcaggcaatccttggaattgcttggcttagcgatctctctccgctcactcagtcatgtccaactctttgcga

SEQ ID NO: 39852 - DNA, 201 bp, Bos taurus
cacccgggtccggggtgtggaggtcctcggccccaagcccactttctggccgctgttccgagagcagctgtgtcgccgtacgtgtctcttctacaccattygggcccaagcctggagccgggacattgcggaggaccgcaagcgcctcctccagctctgtcccaggtaggtgggcagggtgcagccaaggagatacggtta

SEQ ID NO: 39853 - DNA, 201 bp, Bos taurus
gggacttgggcctccttgggttttagaatccatggagatcctggaaccaatgccctgcagatgacagggatgattgtatatgtttctgtcgtgggcaagcrtgattacaaacaggatattttggcccatgatgaggtgttctaaattcagatatgttgtggagtgtggttgcacagatggtaatttttacccacccatctc

SEQ ID NO: 39854 - DNA, 201 bp, Bos taurus
tttttattatactcacttttttcttctgattttacagaagaaaaattaaattaaaatattttgtgggcccctgaaagtattgcaggcctttggcactgtgyctcctgtggatacgactcaagccacttagcagcagcagcagctcctgtggataagctggccctgtctctcatccattgatctcaccttcttttcagcagc

SEQ ID NO: 39855 - DNA, 201 bp, Bos taurus
ggagagcctgcccgggccccacccgtgttctgctggctgcttgcctgccacgcgcccaggatcgctcagggctttgctcaggtatctcgggaacagctgcrccggaaactgggggccagggctgggaggactgaacccaggctgcctcagtaggatcagctctctgtgcggctgttcactgacagtcaagggggagaggag

SEQ ID NO: 39856 - DNA, 201 bp, Bos taurus
tggccattcataaagacccattactccaaacaaccaacctgagagcccttcaactgcgactccacacacacaagggagtgacaactggccagaaaggcccygaggctttctccagagaacactacagtttctaatcaactcaaagacaaactaagctctccctaagagaaaatgcgtcaccccatgcacggatctacttgt

SEQ ID NO: 39857 - DNA, 201 bp, Bos taurus
cttccagatgtgccagggcacgagagagccgaaggagcctccggcccagtggtctcctgccgtggctgggaggctgggaagagctggcctctgtgtcccaracttcaggactgccaaggcagctgggcagatccctactcaagagcttcatgcaaatccatgtgagcagggcaagaaagacttctgtgctgcacctgcagg

SEQ ID NO: 39858 - DNA, 201 bp, Bos taurus
atgaaagcccccctccctaaccccggcagtccctggtcctcattaaagactctaatcctccagccctgctgcagattcagaggcctccatccccaggtctkaagggaaggggacaagcagtgatttctcttcccttcacccacccccaccaaccaggctgggcttgggcacctgacccagcggtcaatgggcatctgaggg

SEQ ID NO: 39859 - DNA, 201 bp, Bos taurus
gtgtgcagtgcctgtcccagtgcccctcacaaacaccttccctcagtttcctgccagactcctcctggcctcactgttccatctttcctctctccctcccrccggccacttcctcatgactgacgacctcctttagaattatctgaactcttggcccaactttgtcaaatcccccaccatcctcagccctgtcctagcttg

SEQ ID NO: 39860 - DNA, 201 bp, Bos taurus
ggggtacctctcctggcccccagtgccgggccttggggttgggttggcagcagaaagtgccaaggatctgggtcttgacaagataaatccctctccccacygtcttggccggcagaccagagccgaggcaggccgcccacccgctacaaggcaggatcctccaggggccgccaggctgaggccatcgtaaatagcttaact

SEQ ID NO: 39861 - DNA, 201 bp, Bos taurus
tggatccaagcattaagaaaacagaatggtccagagaagaagaggaaaaactcttgcacttggccaagttgatgccaactcagtggaggaccatcgctccratcattggcagaacagccgcccagtgtttggaacactatgaatttcttctgtaagtgaacctccaaaaatggtactaaaatgtgtatatcttctgaatga

SEQ ID NO: 39862 - DNA, 201 bp, Bos taurus
ccagtggctgctgaaccgccatccccacccctgtccgagttccttcttcctatgtcttcctgtgtctcaccattgtgactgcagagcttgatttggagagyggactgggaaagatgactgaggcctcggacagcaaaggtgccccttactgtgcaaagaggccttgggaaagagattgatatggatttaatggcaaatatt

SEQ ID NO: 39863 - DNA, 201 bp, Bos taurus
ctccttttgcagggtgaactggctaaagatctttttgctctggcctcctctctgaccaccagcctgtaattagcactggctccaccatccccatcaacatrcaatctggttccctggcctctttacgagagttgctcagtcttcccagaacaacatgaccaccccacccccacccccagcctctcctcctctggccagaac

SEQ ID NO: 39864 - DNA, 201 bp, Bos taurus
ggctgaattcagggaccctcttgaaccttaagccttaaatgggccatttacaggaaaagagcccttctatagaagtctcatggtgaaggtgcaaaagctgygtgcccttctggcccccaaaaccctcaccgtgggcatgcacagccaggggccttctcgacatcttttgctctcatctttacctctgaaggactgaaggga

SEQ ID NO: 39865 - DNA, 201 bp, Bos taurus
tctgagggtgtttctagaagagattagcattttattttgatagaccaagtaatgtgggttggcatcattcaactcattgggggcccaaatgtaacaaaaargtcaagggagagtgaattccctttctctcttcttgagctggtatgtccatctcttcctgtcttcagatatcagagaccctggttcttgggccattggatt

SEQ ID NO: 39866 - DNA, 201 bp, Bos taurus
cattaaaaaggaattttacattattaaggcttgaaagcaagtcctgttgttttatcaccacagctaaaagtcttgaggaaagtcaagtgaccatcactggragtgtttttataaagtgaaatgtttgatcttttataaaagctaggcttctttgctaaattagttaactctccagcttataaaatgggatagccaggtggt

SEQ ID NO: 39867 - DNA, 201 bp, Bos taurus
tgatggaagagaaaattgcattcagggtttcagaggatgtgaggcaagcctcttcccctgtcttgggctattcaagtcatcagccatccttccacaggatrtaggctgcttgtaagttccatccctcactctgaccctgacttggaggtccctgactcagggccttggttggtcctccatctttgcacaccccatgggaga

SEQ ID NO: 39868 - DNA, 201 bp, Bos taurus
cagcctgacagttcatgggatcacaaagagtcggacacaagttttagtcacagtggttttcttaaatagcagtgagagatctcactgctgtatttaaaatrgataatcaacaaggtcctactgtgcagcacagggaactctgctccatgttatgtgacagcctggatgagaggggtgtgatggcaatgagatctctcatag

SEQ ID NO: 39869 - DNA, 201 bp, Bos taurus
atagtgaggagaaatgtctgcttctctctgtacccctgaccccagctcagagtcgacgcctctaccgtctacttagagaggccctgacagcactgtgcagmttaccacctgtgcagagagaaaaactcaggtgtgtgcacagacggacagaaggcatcccagcaaaggcctagaaatgtcggtctacatgggaccttcagt

SEQ ID NO: 39870 - DNA, 201 bp, Bos taurus
cagtgaatacagttgaccgtctgggttttccattcatgactggttggattcatgcatgtaaaaacctgtgaatatggagggccagctgttaagtctttgayggtagaaaggaagtctaaaagggatgtggtgatgaaatgcatttcaacagctgttgcttttcttccgaagttactgtggcatccaagggcctagactttg

SEQ ID NO: 39871 - DNA, 201 bp, Bos taurus
gtgagttggggaggtcggtgaagtccgtgatggcttgaaaggcctcctccgtgaaacactgagtcacagcccagtctctgtctatgcagcagagcaagaaragtcctccatcttccgggatgtggccctgctgccccaggctcctcatcccaatgaagtaagaatctcccctcattcctgaggatacagaaacagacgtga

SEQ ID NO: 39872 - DNA, 201 bp, Bos taurus
cacaaatgtccctatgaatcccactttgacaaggagtggcgggcggggacacagagcatcgctgggtgctggctccgtcatttcttgcctgtaaggccttrgacaagttactggaattccctgagacttagtctcctcacctagataaacgggaatccaaaatggaacctacttcaccagagtgttgagaagactctgtat

SEQ ID NO: 39873 - DNA, 201 bp, Bos taurus
ttcctaattcttcctgtttctcaattgcgttcattttccccatgaagcattgaccaagttattttgcccacaaaacccaatcccttgtaggagtttccatrtgcttatttccaatatcacacaaagtaactcatggtctttttgtctgagttttcatctattgtagtgctttacacaagccctttctctctacctggaata

SEQ ID NO: 39874 - DNA, 201 bp, Bos taurus
gacaatgttagtacttatcacagggttgtaatagatacatgatcttagacaagcttttgggagggagaagctctaacttctcttctaatgaggacattctkgaggtcaagctgtgattttctggctttccatgatgctatttcctcgagtgctgtattatgatatagacaaagttcagcacaaatctcaacatgtagagtc

SEQ ID NO: 39875 - DNA, 201 bp, Bos taurus
ttaaatccaggcactctcaagctgtgtataaacaaagctaatataaatggagggctgactaaatacaacctatctggataattcaggccccaagtcaatcrtctaaaaaagattattttgttctgcctggttggttcactgtatatggaactaaacatctgccatatgtacataccttttctggtgcacttgagaaaattc

SEQ ID NO: 39876 - DNA, 201 bp, Bos taurus
ttgtcattgattttatgctaagagcattagtatgaagaatattattggactagatttagtatttcattctttccaaatatcaaatcccccttccttaaaayttggaagctgctacatattacctttcaatttcatttatttgtatctacagcttatgttctggactggtagcttctattctgggaacacctgctgatgtca

SEQ ID NO: 39877 - DNA, 201 bp, Bos taurus
caataataagagcaacaaagacatccaggccaagggaaaatgaattttttttaagctcaccttcagctgttccacatcaaactctaaatctagtacattcrtcactggcctcccgtgatcaatgtccagaatcaaactgagagcttgagaacattcctttgctcgttgccgtaactaataggatgattgtaagaaggacat

SEQ ID NO: 39878 - DNA, 201 bp, Bos taurus
tggggaacttgacagctgatgtggaggatacatttgtattatttccaaccaacaagaaacttttttttagcaaatacttttaagtcaggccatccaggcaytttagttatttgtttgtttttggctgcatgtgggatcttagttcccaacccgggatggaacccacgctgccacagtggaagcatgaagccctaaccacga

SEQ ID NO: 39879 - DNA, 201 bp, Bos taurus
tgagaatttgcagaactggtgggccagctagcttaaccttgcaccaagtgctttcttcctgaagtttctccaagtgtttaactctgcaaaagtcaagaacrtcctcatcctcttgtagggagctgaagaattttctggccgcactccagatgccgtgacgtggaaccattggtcagaggcaggcggaaacaggcctgggaa

SEQ ID NO: 39880 - DNA, 201 bp, Bos taurus
atactatcactgcttcaattttaccattgaaaacaccgaggccttaaaggaatgaaaatcgcttgccagaggacacagggctaagtgcaagagctacagtmctgggacttccctggtggcccagtggttaagattctgtgcttccaatgcaggggccccaggttcagcccctggtcagggaactagattccacatgcctca

SEQ ID NO: 39881 - DNA, 201 bp, Bos taurus
aagggcccattaacctgagcatttttattttcagcaatgggtagaatgttccccagggtcaaggaggtcatgctgatgatagtatgtggaaggtgcttctygaattgtcctggcccaatagacacatggcctgtgatgggactgggggtattttggggggggaattcagtttcataattgtaaccttgattgctgagattt

SEQ ID NO: 39882 - DNA, 201 bp, Bos taurus
gctggctgatgtaaacaccgaggtggaatgattgaagtttggctctgcctgtccctttgtgtgctgtcttcagccaaaggcctgcaggctttcatctgctragcccagccgtgttcaacaacatttttcttcctgcctgccttgactcccaccccttcctctggccgatgtctcaaaggaaatacctagcaaggtctgaac

SEQ ID NO: 39883 - DNA, 201 bp, Bos taurus
tgcactgcctaccttcaaagttatattccaaaggtgcaaccatttacatagcccataccctagaacctggcagagtaatctgcacatagtaggtgctctayacaatgaggctgatgaaggcccactttgggaatggtgtacctccccaaaaaagtctatgactattgagctggtcaatgcatgttttattctcagatttcc

SEQ ID NO: 39884 - DNA, 201 bp, Bos taurus
tgctgtgaaaagtgtggcctgctctttgtctttctcatttatgttatgatattttcagtaattcaaaaatttaattattttttctcttttcaattgtccargaaactctaaaggagctcatatggccctcctatagggatacagctgcttaaaatggaaaggagcttctccagacagaagtttatgaagtggagtttctct

SEQ ID NO: 39885 - DNA, 201 bp, Bos taurus
gatggagttgaaactgtcattctggaatcaaggacagaagtgaaggcagttgtcatgtgaattctgaagcttcagtgtccagagataagtctcttgggccrggaaaggacatttagagaaagaggggattaagacttcaggaagtatatgggaaagagaagcagtgtcttgttctgcaacctactcacataacctttccca

SEQ ID NO: 39886 - DNA, 201 bp, Bos taurus
aagccagcaataatcatcttaaccaactttaaatgtctgttaagtagtgtactcagggcatcttcttggatgcccccaaggccaaatgatggcatcaaatkgattacatcattctttggcagtagaagctgaaggacattgagatcatcgcagcaatacccactgccaagatgggaccagcggctctctggcctctttcaa

SEQ ID NO: 39887 - DNA, 201 bp, Bos taurus
tcaaacatggctgtaaattctttgctagtttttgcattaagaagttgagtctaattttcatttctttgtatctgggccggcttagagacatgcttgactartagtatgtgacagaagtgatattcttgtactgctgaggtcaggctttaagaggttccagattccacccaggcctctgagtttactctttctgagagtcct

SEQ ID NO: 39888 - DNA, 201 bp, Bos taurus
tcattctaaagaaatgtctgaaatatctgcaagagttaagagcaagataagcactaatttaccatctccttcatccccataaggaggtacttaaaagaggrcaaaatgcatcactaggtattgtcagggtcaaactaagacttcagtatttctttgaataaaagtactatgctccactgcctaagatgaagagtgtttttg

SEQ ID NO: 39889 - DNA, 201 bp, Bos taurus
agctatgggagcagggtcatccagagtcttgggggcccaaccttccccaacaaaccagcaggtgcaggaccagctggatcccagatggcaaaccactgccycagtgggcctggaggacagagtgtcaaggcaaagaggattatcctcaggccttaaggggtttccctaatagctcagtgggtaaagaatctgcctgcagtg

SEQ ID NO: 39890 - DNA, 201 bp, Bos taurus
tgcctgaactcccctgaactctagtaagcagtatttctaccatctaaggaaaagctggaacactctagaatacatgttgaagaggccaattcatataaatratatctattctctcatgcaaaacagaagcctccagtttgttttgaagtaactagaggcccaacaaactatgctgattaggaagttatctctactaaaatg

SEQ ID NO: 39891 - DNA, 201 bp, Bos taurus
taaaaaaaaaaataggtcttgaaaaaagacacaaatgattgcacacaaaaacatgtgaggactttgttgctataacattttataaattcttttctctagakggtttagcctataaaagaaaactcctaagattcaatctattgatagctaggagtgttaagagtagctggaaagttggtttatttattaaaagtgtactat

SEQ ID NO: 39892 - DNA, 201 bp, Bos taurus
gaggagccaggcaagctacagtccatggggtcaagacacatccatggggtcaagacacatggagtcagacacatctgagcaactgacaatctcatttttayttcatggagcaaaataacaggagaactgtagaaactagttaaggagctatagcaaccagggaagtgcataaacaagagaagggatggttcaggtgaggcc

SEQ ID NO: 39893 - DNA, 201 bp, Bos taurus
gaaattcacattaaatgatagacttatgtactgtaatagtccaggaaacatattcagaagatacaaggaaatttttagtatattttaaactgtgtataaayaatcaattgttaaatgtgtaaaatagaaacttttccttttataaagcaacctaggtaccccatgatttgtggtaaatgttaatcaatcaaaagacttaat

SEQ ID NO: 39894 - DNA, 201 bp, Bos taurus
tcaccagggaaacccccataaaactgagattaaagatacaatcttttaattgtgttgactgaaagggcaacaagtgaccatactcaatgataatccctgaytgtcagatctttgtaaatatctttcagggagactagagctcttagagaaaaaggctgaagaacaggaaaaagggaaggagaaaaagaaagaataccttga

SEQ ID NO: 39895 - DNA, 201 bp, Bos taurus
agcgacaaactgctgggggtggtgctgtggtgggctgggctagacccctctggggtaggagctgctttgaggaggattctggttcagtctgaggccatccyctgagtgtggaaaaccagtcccagccaaggttgcccactgggtgtggcagggtgaaagctgctgtggaagagggctggccagggagggtgggttgagagg

SEQ ID NO: 39896 - DNA, 201 bp, Bos taurus
ttgttccctccaccacacccaccgccagccccatcacatccccgagtatctctctctgtagcatgctgggctgggtgtcaggtgaacacatatgaatgtgrctggtatttactcacaatgaatcatcctcatgttggatggaccaatcacaaaaggtaggcataataagacctcactagactttgtaaatacagtttaaaa

SEQ ID NO: 39897 - DNA, 201 bp, Bos taurus
cctttcccttctccaggggattttcccaacccagggatcgaaagcaggtctcctgcattgcaggcagattctttaccagctgagccccaagggaaaccctrggccctaatccaatatggctgctgtccctgtaagaagaggaaattaagacccagaaaacacaggggaagacaacatgaagacacccagaaaaagatggcc

SEQ ID NO: 39898 - DNA, 201 bp, Bos taurus
agggattagagacctttaagaaaaagaaaagctaacatctaactctatccaatgactagataatactgtaagtttattaaaattggaaaaccagcaagctkgaggaagaacttgcaaaatattcatagtaaaaatcactgccttcaatttgcagtgaattttaataattgagactcattatgtttgacccataaaggataa

SEQ ID NO: 39899 - DNA, 201 bp, Bos taurus
ttttgctatgacattaatttttgctgtgacaatgagcttttcactttgtttatctccatctcattttttctcatttttaaaacggaaagcctgtgctccaygactaaaccaccttacagaaaccacctgctctttctgtggggagggaccattgacctaaagcacgtaaaaggccgaaatgctcagttgtatgtcaaaaat

SEQ ID NO: 39900 - DNA, 201 bp, Bos taurus
ttgaaatgtaagtgtcaaggtaaagttcctatattccagtttccatgggggaataagatgctaactgccacggttaccttactccgagttgtaaaataatstactgtattaagatgtgagaaagttttcttttgcttcagtaaagccaatcagcaaacacagatgtcctccatgtccctgtaccacagctctctctctctc

SEQ ID NO: 39901 - DNA, 201 bp, Bos taurus
gctggagtggaagtctgaattttgaatgcaaactggctctgttccttttaaatatatgttctcccttctgcaagctctgggccctttgccccagaggggarcaatgctggaggaagaggagcccatgggagctcctggctcatggcagagacttgtgctacctctgatgtgctgctatgtgagcaccagcaatggccctgc

SEQ ID NO: 39902 - DNA, 201 bp, Bos taurus
ttatctctgggggacttagcccatcctgagaaaatgtcaactgctcagtcaatgggtccagtgtcttcatggagcagactaaggggagtcaaaccaggccragggaacaatggtcggcattgttcttcccaatctttctctggtccctcccccagcatggaaacctttacaggccgctttccagtttgggaccaagccctc

SEQ ID NO: 39903 - DNA, 201 bp, Bos taurus
tcaatccttgattttctgcattaccacaaagccataatttctactgttaattagctaaacctttccattaattttccatgcaaccaccatttctgccccayccactccccccacccaaagcacacaactgacccaaatttttcaggtgttgcagaaaactttgacctatgattattgatcaatccacgttgtaaaatatct

SEQ ID NO: 39904 - DNA, 201 bp, Bos taurus
gccaccgcctggccactgccccattgttcgtcaagcctccagcagcaggaggcaggggacatgtggagtctctctcaccctccggccccacatccaggccytttcatcataccacagacagaccctttccaagaacttgaatggggatccacaacctcccctctgatcgctcattaatctgccccttcagacattcctctg

SEQ ID NO: 39905 - DNA, 201 bp, Bos taurus
ggccattttccaactgtctcaaagaaatttatataatcctcctttctactataagctatgcttataaggaaaaaaaaaagttctattttatacatggaacyatacagaaggcacagctaagttcagaattctcaagggccatatgtataagtgttagttttcctgacggagaagcctggtccctgtatatattaggattct

SEQ ID NO: 39906 - DNA, 201 bp, Bos taurus
gcttttgtctttattttcactaatcctccaattcagcacagacccaacttcctcactggttgtcttctccaagagccagccttgagggcccccttgtgtcygagagaattaaaatccccagagcactgtttgcacaatggcttctgatctgctcgaataatattatcaggcaatggccctgggtattgaaatcccacccag

SEQ ID NO: 39907 - DNA, 201 bp, Bos taurus
aaacacaagtctgatctctatgtctccctcacccgctcctgaagagtctctgcatctcactcatgccgtgagcttggaggtacccaactggccaccaagayagtcatctttcaaccaagccccgatgtccaggtccagtttacctttgacctctactggtagggctggttgacaaaagaaagcaatgactgataaaacatt

SEQ ID NO: 39908 - DNA, 201 bp, Bos taurus
tgcctcagcaaaaaaaaaaaaaaaagataaaacaactgttttccaccaaattaagagtttaaaatgccagttgccaggccttccctggtggcacagtagaygggaatccgcctgtcgatggaggggacatgggatcaatccctggtctgggacgattccacaggccgcagaacaactaagcccgtgtgctgcaactacaga

SEQ ID NO: 39909 - DNA, 201 bp, Bos taurus
aaatcactcactcactcacatgggcacaggcgacacatccaagaacattcaatgcagcattgttttttgttttgggggaggtttctgatcagagagaaaaraagtactttttaattccttcttaactgcaaaagccctttatctcaaatgccaacatatacatttatttctagctagtaaagcatatgagaaccgcagcct

SEQ ID NO: 39910 - DNA, 201 bp, Bos taurus
gccattctaacatatatctgcaagattaatggccttttaacttcatttcctcacctctcttcaactctgttctgtagaagaatctagtatccagaccttgmgaagatggctattttgaggcctttgtctgactagtaagccatcttcttaatctgctgtctttcctaataaagtcacatcccttgcctcaacctgggaggc

SEQ ID NO: 39911 - DNA, 201 bp, Bos taurus
tttaacattttttgtttgacattggccatggagctaacaatttgtccagtaaaaagagagttattagcaatcactagacaggctcaaagagacgaggtagmcacaggtgctgcacaggcgcaggccataccatccttcaagtccatgaaattctccaaagcgggggagaggttttgaaaggtgtttgcatttctggtgtcc

SEQ ID NO: 39912 - DNA, 201 bp, Bos taurus
aatggttggtgtaaggaaccaatataagcatacaaagttggtgttttaatctgtagggtttattattatttatgtgtgataaggccaatagataagtagaygactacagtgaaaacatggtttgtaactcacaggtccccagaggacaggacataccatattaggcaaggtcacatggggaatcatgagggtctgggagaa

SEQ ID NO: 39913 - DNA, 201 bp, Bos taurus
tctggcctattctctctaataagccaagagttatccaatcatctgcaaatcaaacagttcatagcattatggaagaataacaactcttatatgccacttamtatgtgccaggccttgctctaagcattttatagtattatttaatcctcccaacaaaccctatgaggcaagtactattattactcctattttacagttgag

SEQ ID NO: 39914 - DNA, 201 bp, Bos taurus
cccaggtaagataccctttgtgattccctcatcctttgagaaaccctcaccgtcccattgtttcccagaaactgtgcagttcctcttatcctcaagcctcytccacctgagtgcctgtgtactcctctccccctttgacccctgatatgtgctccttctcccttgcccagtgaggggtttttaccccatgtccttgggcgc

SEQ ID NO: 39915 - DNA, 201 bp, Bos taurus
gcttttaacatgaagagtgctgtgagtgatgaaggcctacagggcaagattagtgagtctgataaaaagaaaatactgagtaaatgcaatgaggtcctttygtggctggaggccaatcaactggctgagaaagatgagtttgatcataagagaaaggaattggagcaagtgtgtaacccaatcatcacaaaactctatcag

SEQ ID NO: 39916 - DNA, 201 bp, Bos taurus
cgttaggcatactattttgtgtaagagccaacctgtggagacactggggcctaaggatgtatatctcacactgagtctatggccacttattcttggttagraaaccctaggttagaatgaaatggaggactcatttggattcgagagtgggtttcaggcaactctggttcctgggcacaggggagcagaggtgcctgaggc

SEQ ID NO: 39917 - DNA, 201 bp, Bos taurus
cccgaaggcagctttaggtgctgataaaggcctttatgctaacttggcgagtggtataacacaggtgtttaagtttacaaaaacccatctaaaagtgtgcmaacaactctatggccaaaatggtttaaaactaaatacggcaaaaccagtgtgctttgtctctaaggcatatctgttttcaagcccataacttctatttgt

SEQ ID NO: 39918 - DNA, 201 bp, Bos taurus
ctgcaacccagctcttttaagagtacactaccataagacaaacagcccctccactccccagagagccctaaactcactggccctcaggtccctcctcatcrgagtctcgtccatcttcctcatcgctgaacttgagcttctcagtgtagtcgacctcctcgtgggcccctaaggggaaaagtgaagcatggtaacccaagc

SEQ ID NO: 39919 - DNA, 201 bp, Bos taurus
agaaccagaagggctttcaaatgagggtgaaatgtgagtgaccagagggcaactgaggacatttccaacgtctccatttaggagggaagggagggcccttrggtacaggagcagagagccttgcccgggtctggatgagattcacccccaccctcacccatcctctgacaatacctcatcccacatcacactgaggggccc

SEQ ID NO: 39920 - DNA, 201 bp, Bos taurus
caggacactggagagccttccatagcacccctcagtcgggtcccgcctagttccaggtattccccagatcaaatctctccatctgctctaacttctcatgmtcactttggcctccttgattgtcctactgtttgttctccactctagggatatggagacacctctaattcccttggggaactaataaataccagatcctat

SEQ ID NO: 39921 - DNA, 201 bp, Bos taurus
ggtatttccagctcactggtaacttcctggaggcagcaatatctttggcaggaagccatctcttctgtcaccttggccacaaggccctgctccaggccttraattgataatccacaggagtggacccttctcctgagtcattccctcctggagaggcaaggatagaagagggcagctcttaggacccattggcaccctcac

SEQ ID NO: 39922 - DNA, 201 bp, Bos taurus
tacccttggggtccacactaatttgttggattgtataaatattctgaccaaaaatgttttgaaaatcgctgccagaagcccttgggccaggactcagggartgtgacaaaaagctctcggtgcaggagaggagggatcaggacaacgtcccaggttccccggcgggcaagggtctcagggtctcagaatcaagggccgtgt

SEQ ID NO: 39923 - DNA, 201 bp, Bos taurus
catttcagggccaaatgcttaccactaggaagccaaatccaacaaagagtgcaacagtgacagtggtagcagccagggaaatgaggatgattttgctgggygtcaggggccccgggggtttcgctgctgttactgaatctgttccctccagttgagtgtctggatgtttagtggtgtagtcctctgtggtccccaggtctg

SEQ ID NO: 39924 - DNA, 201 bp, Bos taurus
gatggtactgcggatggtggaggcagaagattgaggaaatgtgaccatggctgatggagaagtgggagatctattcaattatggaagtggccacccacagrgaagagggtgtgcaggaacagggtctgatactcttgtgatctagtcactgggtataaggatagtgctggaggaagagatgacagaataagatttacccat

SEQ ID NO: 39925 - DNA, 201 bp, Bos taurus
ccttgccctgtcagccacctctgaatccccaccaggtgccttcctgggtggattcgataagatgacctgccctctcccagtcctctccttcacccgtctcrgcatcagttgttttctatgaaaacagtggattggttaggttttgtgcagggtcttgggttagagccacaatggatttgaggatgagtattttctttttct

SEQ ID NO: 39926 - DNA, 201 bp, Bos taurus
atctgagtgtttgctatgctgactctgttgcaggtggggcaggagaaggctgtgaggagctgagtgtggacggggcctgggcccagtcagagcatcatggsctttgatatggtcgctgctgttatcatcctctcaacatctttgtccttgtctcttcagtagaaccttgtctcaccaggacctgtgatcacaaggactgag

SEQ ID NO: 39927 - DNA, 201 bp, Bos taurus
gagttttcctctctcatggaaggacgtagtgtctgtctttcaagactctttcatgttgcagctgatatcacagaaatacaaaggagtatgaaagaggactmtgaatgattatacagcaaacaaactggaggaactagaagaaatgggtttatacaacctgccaagacaatcatgaagaaacagaatagctgaacagatcaa

SEQ ID NO: 39928 - DNA, 201 bp, Bos taurus
agtcctcatccttggggcttatgtactcctaagcctccgcttcaggcttctgaatcttttcttcattcagggcaattttattttggcccagagcctccacrtgtgcatatccacagccctctgtctgctggtccaccctaaaagaagtactagaggcctggaaatacagtgtaagtcgttcatttgtttttttctatttca

SEQ ID NO: 39929 - DNA, 201 bp, Bos taurus
gttcagagcgtttgacttgccccgggccactcagccaacaaaccccaagacagagcccagcacccatgtttccagcctccaggcactccccttgcagcagrctgctccagacagacagatggccagactggagtccttcctgagactctaagaaacccacctgcatttcctgcagtatctcctcctgaattctgagctgtc

SEQ ID NO: 39930 - DNA, 201 bp, Bos taurus
aggccaattcaaaccctttgcaaaggcctttgccaggtctccccatctcctcagttgctggaaggtagatagccccaggatggagcctagtcacccttggkggccagaccaggcatggataaagcttaaaagagacagcatggaagagaaggtgtctgaccagccaaagccagtggaacctgtacagaagctgctccctca

SEQ ID NO: 39931 - DNA, 201 bp, Bos taurus
gctctctctctctgctttcatttcattctctctgctgttcattatgcagagtatctatttattaaacttctctgcttgcagttctgagcttgcagctgtgyacactaaggccatcggaaccagttaacccctgctctagtctagtagcttctgatctttgacgcgcatgtatagttaaagatgttgaatgtacagaggctc

SEQ ID NO: 39932 - DNA, 201 bp, Bos taurus
aggtggcccccttttgaagaggtcccctgaaatattttcacctcctaaatgacctgagccctgcagcccaagtgtcctcatttgtaccaccccatggtcaycttgctcctcctccctcacccaaatctttggttttcagagttctgaattttggtgttacagggttgtgttgttttctttgaaattgtactctgcttcact

SEQ ID NO: 39933 - DNA, 201 bp, Bos taurus
tctttaacgctctggtacattctgtcatgactgcacgcctgaacttttgccactctcaagagctcaatcacttcttctgtgatgtcaagcccctcttggarctggcctgcagtaacacgctgctcaaccagtggctgctttttgttgtcacaggcagcgtatctatgggagctttcttcctgacgcttctctcctacttct

SEQ ID NO: 39934 - DNA, 201 bp, Bos taurus
aaaaaaggccctgggttttgtctgacttgatcttactcaagcctgttctgcctcttggaatgtctggttctaaacggctgtttaaggagatggagctgacraggatttctaagtgacacttggccccaggacagactggagttaggaggagtttctgcaaaggtgttggaggaggtaatggaaatggtgagctagcagttg

SEQ ID NO: 39935 - DNA, 201 bp, Bos taurus
aagaagtaatacatgggggaatggaggcgatggtccaaggtagttatggtgataatgaggaggttgcctgtcaaggccagcaggtatgtcatcaaaaacarcagtgcgtgtaaaatctgaagcttacggtcagcagaaaaccccacgaggaggaatccactcactgaggtcaggttggccatgtcactctgaagatagcaa

SEQ ID NO: 39936 - DNA, 201 bp, Bos taurus
agtatgagtggtcctgtatcttaacagttagaacgttttttcctcctcctaacactctgattttttaaatacatattcattggcagttcagtaattgtccrtgtctgcaaaaatggagtttgtatatcttgatatgccaccctctcttacatgtatttttggctttgtgtgtaatgtgctcagtcgtgtctgattctttgc

SEQ ID NO: 39937 - DNA, 201 bp, Bos taurus
tgggactttcttcttttttcctatgactcccagttctacattttcaaagcctctttcattactcatctgctgtgccgattccctgaacgccgaggcggccrcagctcccgaggcattcacggcttctccctcctcacagctcgctggctcccgctccatcgctgtcgacgccacaggactgctggcgcggcaggtcccgcc

SEQ ID NO: 39938 - DNA, 201 bp, Bos taurus
cttaacagagtgaaccaagctactttcagtttctgtacttttaatttttgataggttcggccagtgagaaagggcatgagactacgatcccaatagcccgmgagctcaggacagtctgtaatcaccgagtctgtgtacatgtctttccgtttccatcaggctccttttgctgccaggacgcccctaggttaataagcgttc

SEQ ID NO: 39939 - DNA, 201 bp, Bos taurus
gcttttattcctaattgcagactacaagacttttttgatcttatctttcccaagacactatgctgacatagtccagagctccttgttttcaccccaggccrttctcttttgggctagtcttgggaacgatcagcaagtgcgtaggcagcattcatgtctgatgccaatctggtgttccaaggtccattctttcatgatcca

SEQ ID NO: 39940 - DNA, 201 bp, Bos taurus
tgggcaattagcagctcaaggttggaaaaaagttactttcaggcagaacccatcctccttatagcaacacagaactaaaggcccctgctaagtagttgaartgggagcaaaggaatgcaggggaaaaaagtttggcggcttgccagtttgtctcctcctggggcttggggaccacaggcctccctaggcagacttgcctag

SEQ ID NO: 39941 - DNA, 201 bp, Bos taurus
catcaaaaatggtgcctgaaagcaggcataacatactttcttactgagatcatggggaatgaacactcttttgggtaattagctgggccaccaaagggaakagagtatattcttaggggaaatcttgcagtaacatcaaatgattgagaatcaaaactcttaggttcttttcttgctttctgactggggccacaattgtcc

SEQ ID NO: 39942 - DNA, 201 bp, Bos taurus
atcgaggtcaaccttggcccgtacggggatcgaacccgcgaccttggcgttattagcaccacgctctaaccaactgagctaaccggccaggacgacacctytgcccttcacattacaaacgacacttaaacagcatggttttgcagtttactgtgggaagcataagttgcttccattctttttctcgtctttcttcattgg

SEQ ID NO: 39943 - DNA, 201 bp, Bos taurus
agtttttcttcctgtatagcttttaaatcatttcacagcaatcttcctcctaggaatgtacctcagtgaaattccagctcaactccatggttggccttgtytaagtgcaggattttgcagtaccagattattacaggcaagctagatatccaccaggtatacgtcagtggccacccatgaatttcatactatgtagcagct

SEQ ID NO: 39944 - DNA, 201 bp, Bos taurus
tcccatacagcatctagtagggtcaagatctcttccttgtttttgatgtctttactgttagctgttaagagccctttctccttgtatagggccccatgtayattgcaaagtagcaaaagcatacctggagtcagtgtaaacgttggtcttcttaccttttgacaactggagggcccgaatgagagcccataattcagtccg

SEQ ID NO: 39945 - DNA, 201 bp, Bos taurus
tgatcttgatgttacttggatcttccctgggtctccattcattgcctgcccagccaggccactatttggggctggaagatggagaaagaccactaagatcytcttttatggagtcctgggtctgagaccataagaattagtcactcaccagcataggaccgagcttttttccaatctgcaatagaaaaaagagacgtgagt

SEQ ID NO: 39946 - DNA, 201 bp, Bos taurus
ggtggccctgaaaagggccgttgtttaataagcagaagcttcgtaactacttggcaacttagccgccgaagccataaagggtgcgcccctggcgcttgagygcgtagaccacgtccatagcggtaacagtcttgcgcttggcgtgctcggtgtaggtgactgcgtcccggatcacgttctccaagaacaccttcagcaccc

SEQ ID NO: 39947 - DNA, 201 bp, Bos taurus
aaaatgatacgtaaagccaacaatatcaaagttgcttcttttaaaattaataaaataagatcaagaaaaaattatcaatataagaaatgaaaaagggttcrttgtagttttagcccataataaagcaacagaatattgtaaacaatattatatgtattataaattataataaatattataaatatttaaatattataaatt

SEQ ID NO: 39948 - DNA, 201 bp, Bos taurus
cttgagttcttgctcctgaaaaatggagatgatgctggcagcttgaaggattcttgtgaggtttcagtgaattaattcatataaagtgctcagtacttgayagacatgccttcattatgcagtgatctctcttttatgtatttgtttccttttctatgtgtgtgtgctaaagtactaggttgaccaaagatgttttggaaa

SEQ ID NO: 39949 - DNA, 201 bp, Bos taurus
gcgaagtcttttgtcatctgaacccccagggaatgccaagaattcgggagtgggtagccttcgctttcaccagaggaacattccggacccaggaattgaaycggggtattccacagatctttactagctagctactgtaaagtgagcccagctttttcaagtgtattaggtggctctgaaaagagcctttgggttgttgaa

SEQ ID NO: 39950 - DNA, 201 bp, Bos taurus
gcttgtcctctgagcacaagcctgacggggaggctgagctgtaaatatcagggctttgctgcatcaacattcatatcacaatgcaaggagccaagcttccrctctgagagtttccaaataaggccctgagaggatggttcaggtgcaaaaatcaaattctacttggtacttaaattcctcagcattctaggctgccaaacc

SEQ ID NO: 39951 - DNA, 201 bp, Bos taurus
ggtgggacactgcttaaggaggaggccagtcccttaaatttatttactttaaatagtgtaaactatatacagtagccaccccccttattcttggggaaacrttccaaggcccccagtggaagcctgaaagcaggcagtactgaagcctatatatatatgctatattttttcctatatatacatgcccataatagagtttaa

SEQ ID NO: 39952 - DNA, 201 bp, Bos taurus
ttaaagaaaaaagtaatatttaaattaaaaaatagaaaaaaaaagaaactgtttacaaatagatacttttataaggcctgtttcatcagagaaaggaagcraggctgaacagtgttataaagtggctgggctatggtgtgaaccaggcaggattcaaggcccaaggccttaaccgctgggccctacggcctcccgagggag

SEQ ID NO: 39953 - DNA, 201 bp, Bos taurus
ttcatttccatcaaggtacggggtcggcactgctgtgtgctgtctttgctgctgccacagctgaatagtctgtcatggagacctgtccctgagacgtctgyctgctgcccctgcaccccccagaccgctgtctgtgcttgtagcacatccccagacccaccctttgtgtcagagcgggcagtgcaaatgtgagacgggctt

SEQ ID NO: 39954 - DNA, 201 bp, Bos taurus
tcctgcttcatggcagaagagagaacattttgaaggaaatcaaaaggttcgagtttttattccttggatgttatctgttagtgtgtgaccttgaaaaagcrccttccatgctgagtctcagtttccatgtctgcaacatagccatatctaaattaattactatttaatagtaataattaacgcaggcctggctgctatact

SEQ ID NO: 39955 - DNA, 201 bp, Bos taurus
catgtcccctgcattggcaggtggagtcctaaacactgaaccaccagagcagtccctgctatttattctttatgtggccatcagagccaaaataaatacaygacttggtcattccagccccaaatgagacatttgaacaattgactcagtttgtccctctctttaaccagcaggtcatagactcttatttagaaacatcca

SEQ ID NO: 39956 - DNA, 201 bp, Bos taurus
aggctgaagattctcaagcctgtgagttcccactccacagtgttggggtttgagggtggaaagcttgtgtgaagaaggaaaggaaaggaagggtatctgcrtcttggccaactggacctatcttaaattccagggaagctcagccaaaagcttgacagcagtgagtccaaccaggcaatttatgcaatgttgaattccaag

SEQ ID NO: 39957 - DNA, 201 bp, Bos taurus
tcctgcatttccagtattggcaggtgggttctttcctgctgagccacctgggagtcccttttagttctattgttcagctccaagtcagaaagaactgctayccaaagttgattcttcctacctttacaacttctgccccctagtgaaattttctcctgctattctttctagctccaagctttcaaatatctgaatcttccc

SEQ ID NO: 39958 - DNA, 201 bp, Bos taurus
acaatatttttttcagttttctttcaattttctgataaaagctgagtaactttgcttttcacgtttagttttagtgccacctaaattacaatttttgtacrgttgaggtaggaatcaatttttaattgctccatctataggaccaattgtcttggcaacatgtatctttttcctattattttcaaatttcacctccactat

SEQ ID NO: 39959 - DNA, 201 bp, Bos taurus
gtttggctgaattttaaaatgataaaaacatgcctgatatctagcctgtatgaacattgcttcatttagaaatctgtcatcttttaaagtatttataataytcattaaggtgaaagggaagggaagagagagaaaagtttttaagcatccaagagttcaaacaattattttaggattaattagtaggcttatgagattcct

SEQ ID NO: 39960 - DNA, 201 bp, Bos taurus
aaaaaaaaagtgacttgcccaagaatacatacatatgggacagcaccactgaaatatgttctttggcagttcagtttcagaggccatattcttaaccactrtaatattgtattaatattagaagagtgtccttcataagttttgacattctatgaagagcaatacagtaacattcagttactggcctcaataagcagacct

SEQ ID NO: 39961 - DNA, 201 bp, Bos taurus
aaaaatttcttcttcagttttggagctgtattattttgaattggcattattgagatatgattcatatataataaaatgcaaaatttttaagagtataatarcatgtttggacaaatacatataaccaagtaaccaatatcagaataatgaatgatatggaacatttccatcaacccaaaaggtatcctgtgcccctttgga

SEQ ID NO: 39962 - DNA, 201 bp, Bos taurus
gggactttcaaggtaagcattctatttttagttctatttgagattagctgaatatcttaacaccattctttgaaccacgttaaagggccaaaatctattamaaataatttttggtttctctttcttcaagataagggatttggccttttccttacctctctttctttctctgtgttagttaatttattctgggtttgtaaa

SEQ ID NO: 39963 - DNA, 201 bp, Bos taurus
gtaactgctgtttccaagtctaccacttgaaggataagagacacagtatgattacaaaaatgactctagatccaaatagtgattccatggctaaggccccycagttgacttcctggaaggagagtgaactcctatccttcttggaggaacttttctctcagacaaaagtagaactaagaagtaagggctggggaggccatc

SEQ ID NO: 39964 - DNA, 201 bp, Bos taurus
gcctcattccttgcatgtggtcaaggtctatttcatttcctgtatctctcacatcctttgctacttttcacttggcagagccctctttgatttttagtgtmataatattctttctggtctctttctctttctctaccagccccaacagccacaactcctcaatccacattgaagtttctcttttctaattctggacattct

SEQ ID NO: 39965 - DNA, 201 bp, Bos taurus
tttgtccttagatattttctttgctctaaagtctaatttatctaatattaacatatgttgttatcctattttccaaatatccatgccattattgagtttcytggactttcctggtaattcagacagtaaggaatccacttgccttgtaaagacctggattcaacccctgggttgggaagatacccaggaggaagacatggg

SEQ ID NO: 39966 - DNA, 201 bp, Bos taurus
tgtttccattcagtaaccaccgctgctattcttgacatagcaaggccatttcttcaaatgtaatcttacatggaaatctgtaaaagaggggaaaatcgacrcattctggatagcaaaggagttattgttaaatcctgtcaaaatatcccctctttggctgttcctggatgactctatagaatatatatggctctgttcaat

SEQ ID NO: 39967 - DNA, 201 bp, Bos taurus
cacaatcctaacattatttaaaatattttcacatacatcttctcttaaatacaatctgttctcttactaaaactttgttaataatatcaacattctttccrtctgctcagcatcttaataatggagatgataaaatgaaggaagaaggtcaaggagaaggaggatgtttttaatgaatttaaaataaatttaaaatttact

SEQ ID NO: 39968 - DNA, 201 bp, Bos taurus
cttcagaaaaacagcctgactgctgtggactgaatgagttttcatattcccctccaatttttaattttaagctgactcttatcatcttccttttccaattyccacttcggccttgattttggatgtgggaggtattaatagatagaggcaggagctcagccttaggtccccaattttggatatgacagtgcaccttaataa

SEQ ID NO: 39969 - DNA, 201 bp, Bos taurus
cattctctttactcaaaaatagtgaagtaaacaaaatataggcacaaaggagaaaatattcacatatctcattaacccacttgcacaaatataagtggaarcctggggaaaccctcaagagttcaccttgtcttgcctcttgccctctgtgaaggcactatactgagtcaattgtcagtaactgcaattaatgggaaaata

SEQ ID NO: 39970 - DNA, 201 bp, Bos taurus
taaggcttggactgtttcttctatttaattcaaagttggagactgacactaaatagagaaactttggatgctgatgcaattctggtggtctccacactaaygatgcctcttgtctgaataaataatacaatcaacgacacactaattgttcatttctctcctgtttcttctacatgatacaaaaggattcctttcacttga

SEQ ID NO: 39971 - DNA, 201 bp, Bos taurus
gcaggttcaggaagctgaccccagacttgctgaatgaggatcctttagtgtgaaggaccggaaatcagacttttaacaactttcccaactgagtctcccarccactaaaatttaatcactgttgtccataaatagtggctctgcttacagttcctaatgcatagaataacaacgttacttaaaatattgactttatcaagt

SEQ ID NO: 39972 - DNA, 201 bp, Bos taurus
aagtatatactatgataccaggtactgcatggcaactataaatgtaggccaaaaaaataactgtgtgtagatcacagctatttagctgaaaaaataatttkgtaaaagtcaactaaaagtaaggcctctgatagtgttgtgaaaggatttgatttctcccttttcaatttttaaaatcctttagaccaattttcttcaaca

SEQ ID NO: 39973 - DNA, 201 bp, Bos taurus
ttgataactaaaggccaacacaatataacagagaaagctcttggcttgagagtcaagagaccaagattctcgtctaaacatttactcactagttgtgggartttgcgtggccatttgacctctttgagctaaagtatgatctgtaaaacatcaagactggatatgattattaagacctatacttgttttaaaagtctatca

SEQ ID NO: 39974 - DNA, 201 bp, Bos taurus
cagttgtgtctgactcttcgcaaccccatggactgtagcccactgggctcctctgtttatggggttttccaggcaagaatatgagattatgtagctattcycttctccagggactcttccagacccagggatcgaacccgggtctcctgcattgcaggtggattttttgccatctgagctagaccgtaaaacaagagatgt

SEQ ID NO: 39975 - DNA, 201 bp, Bos taurus
tacagatacaagagcattatctttattcaccacgtgccaaatacttagcacaatgcacagcacacaacagaaactcaataaatacgaactgaattcaagarttcaatttgaggaatttaggcacaccgcacggagaaggcaatggcaccccactccagtactcttacctggaaaatcccatggatgggggagcctggtagg

SEQ ID NO: 39976 - DNA, 201 bp, Bos taurus
tagagctctttagaatatatgtcctgacacaaggttaaagtacggcagccaatgctatttatacagactacagcaaaggacatagtccacagctgcttaarcgcaacgagacctatctccccatgtctgcaaagcacactattcacaccagaacttcttctggcaacaagatctggctaccttttatggagataatccagt

SEQ ID NO: 39977 - DNA, 201 bp, Bos taurus
cgcaagtggtgtacactaataaatcccttgctcctaaagaatgttctatgtgtaactttcttcctgatgtcgaatcgtgcgcttggcccttcagacaccayagtcaactgctgagcaagtctaagtagcctaaaggagtcgaagcaccactccaggcggccaactccatcctaaggaattatttatgcctgatgagcctct

SEQ ID NO: 39978 - DNA, 201 bp, Bos taurus
agcttctggcgctcgcggtcccctttctactcaaacgcattaaattggggcgggggtgggggccgcgtgaagtgagagaggtgatgctggatggccaggaycgcataggttatcctgggtgggtcgtgaaactgaaaggggcggacgggatggcggactcctaactagtggtccaggcccatccctgcatccctgcatctc

SEQ ID NO: 39979 - DNA, 201 bp, Bos taurus
ggagggccaacttcaaacttgttttaaattcgtggaaaagcagattttcggttggaattgtgactcatttaagtgatcatgaaagactgaaaagtcacctktccagtgggccttccttcttgatcaacaaaatcaagaagagggcttccctaggctttctttcttaaaggtaaagcttagtcaagtgacttaactttgtaa

SEQ ID NO: 39980 - DNA, 201 bp, Bos taurus
ccagattcactatgtcaaagccctaacccttagtgtggctgtatttggaaatggggtccctaaggaagtaaagttaaattaagtcataagaccggggcccygatccgagaggattagtgttcttattaaaattggcaccagagtccactctctacccataaacatgtgcttaacaagaaaaggccatgtgaggacctagag

SEQ ID NO: 39981 - DNA, 201 bp, Bos taurus
gcggcttctgggccaggaaatctcgcggtgagcaacgtgaggtcacaaaccggaaatgcatagcttttcttgacctaggacccctggcgaacgttaaagamtggccggaggtctcacctgagagttcatctagcgattcctataacttgtgttaaacttttccacagttattataaatgtgaaataagtacctggttacta

SEQ ID NO: 39982 - DNA, 201 bp, Bos taurus
cagccccaggagtgagggaaagctcaggtcagcagaggtgaagccagggcatcagagttccccgcaccacgtggtcaccaccagagcagccccgaggcccrcctgggagtcacagtcctgggacactaggtggtgattggaaagatttgcccagtgggcaggtgggactgaaacggatgtaccagccataactgcagacct

SEQ ID NO: 39983 - DNA, 201 bp, Bos taurus
aaaactcctggaagatctcataggcaagacatttcctcacataaatcatacgatgttttcttaggacaaaaataaacaaatgagatctaaccacacttacragcttttgcacagcaaaggaaaccatgagcaaaacaaaagacaacctacagaatgggaaaaaatatttgcaaatgatgcaactgacaaaggcttaatttc

SEQ ID NO: 39984 - DNA, 201 bp, Bos taurus
gagcaggcgagaaagagtgggtacaggaacagtcaggctggtgaggaggtgattgccatagtcctggaggaatgatggggtttcaacaaagggagtggccrtgggagatgaggaagctggtggaacgacattcagcaggtagaatcggtctgacctggagtcctaagtcctttgaattgcaggatgaggatacctctggcc

SEQ ID NO: 39985 - DNA, 201 bp, Bos taurus
atactgagactgtccagtctcctccttttgcaacgaagtattgaaattcacacttcggtcccagtagtcctgcttgggccccatcctgcagaaaagtctgytaattaaagacgttcctgtgttagatttctaatgggaaagctgtccttcagtggctcaaaacaaaactgcacagtgaacttttatagggccttgtgtgta

SEQ ID NO: 39986 - DNA, 201 bp, Bos taurus
tttgtttatccaacccagtatcaacatatcaacagagagccaaatgagcatactttagcattttgcttttgtgtaagaatttgtactccctccatcgttcygtttagttaagaatctattcatgtgccacctctgtgctgttgagagtgcagtgaatagatacgggtctctaccttcaagtggctttcagtctatggggga

SEQ ID NO: 39987 - DNA, 201 bp, Bos taurus
acaattacctacataaaaattcactgggcagcctttgtttctgaagtttatttgtgtaagtcttttatctcacaatattgtggccagattgagataattgrgggtgcaggggggcggggggagggcggtgaaggagccaattctgagaggggagaacgggaggggaaaagacaaagcgctccttcacttccaacttctggc

SEQ ID NO: 39988 - DNA, 201 bp, Bos taurus
catccttccacttcaattcaaactcagaatttccattctcagtatttcagatgagggctcactttgaaacatatattgaatggccactgtatgctacattyttattggacagggggacaataaaagtgaatttagcatgattattcctttaaggaattcacagtgcagcaggcaaaatggccataaaaataatatgaaaat

SEQ ID NO: 39989 - DNA, 201 bp, Bos taurus
agcatcagggtcttttccaatgagtcagttcttcacatcacatggccaaagtattggagtttcagcttcagcatcagtccttctgatgaatattcaggacygtttatattcctttgtaatggcctctcacaattctgggagtttagagcagttgcaggtgtcccggggacaggaaagataactacacatcatcctagcccc

SEQ ID NO: 39990 - DNA, 201 bp, Bos taurus
tgctcagcctaacatcaaattaacagaagcatcccagtttcaaaatacaaagagaacatatactcttaaaatgactttttttttcatgtttttcattgaayttaaaacataaaaagctatgtcaaacacaaaaagtacacagtgaatataactttagggaagaaataactaacttgtttaacaaggaaccagttttcagag

SEQ ID NO: 39991 - DNA, 201 bp, Bos taurus
cctacaggggaacccctgccaggtgttctttgcaaaatggcctgaggacctggtgagatgaggcagcccaagaccccatggattttctaagtctcagaggrgattttgcaagggccaggctgagcaggtgtctactcacccctccttttcccattctaatgaagccacagggactgggcaaccctaaaccactggtgatag

SEQ ID NO: 39992 - DNA, 201 bp, Bos taurus
cactaggttcccagcactgcgctcattcctttacctgcaggagatcatttaattgtcaaaatgcccaatcagtagaatctgatattggccccattttacaraagagaaaactgaggttcagagaggccctgccactggtaggagagctgaaagcagtggtaaaggtggatttgggtccatgacaagtaggcgtgaggactt

SEQ ID NO: 39993 - DNA, 201 bp, Bos taurus
actgtttcaggcagtcagttggcccttcacactcttccagtgtgaaatcctaagacccaaagatgctgctttgattaacattgtagatgacaacttccacrtggccttgccattttcagagaggttagctctgtatcatctcgttattaagtcgggcagacaaggtagtcaagaataattagcattaggagtaattcattt

SEQ ID NO: 39994 - DNA, 201 bp, Bos taurus
ataaggactggctgctcctatgtgccaggccttgctggcaacatagcacttaagaaaataaacactccctgatctcttgggctaagaaatctgagtccagrtcttcaggagtggggcctaggcatctgaaatttctaaaagctgagcagccaagattaagaactggggagtagcaaaaagggcaaggagtccaacagctgt

SEQ ID NO: 39995 - DNA, 201 bp, Bos taurus
gattcactagatttctttaaataaagagcttgcccctcgtccctgacaccctgcttctaaggtccagttttttaagttctatataaattccgtggtatttraaataaggatgcggggctctggaaccagcctgtctgaatttaagatatagaagtgccactgtaaccttcctgggcctcagtttcttcatgtgtaagatgg

SEQ ID NO: 39996 - DNA, 201 bp, Bos taurus
tttgtaatttaaatttccttctaagcaaggaagtacagtatattattaattttttaaaaaatatatacttagaagttcaagttgtgtaattatcttaatgytccagagcctcttttctgactaaacattggaatttatgatgttgaatgcagggaatttgtccagaaaagcttaaggaaatttagcctacacggggaaatt

SEQ ID NO: 39997 - DNA, 201 bp, Bos taurus
taccaacattaacttatcaatcctcctaacacttctgaacaagacatcaggattcttgaactcagcataaaaatgggttctgtggaatggcctagccactrccattaaataaggagggaggaggggaattaaagctaaaatcctccatttctaaactacttcttggtggcctgacctgcgcgcacacacacacacagtctt

SEQ ID NO: 39998 - DNA, 201 bp, Bos taurus
ccctatggggcctgactgcactgatatttttttaaagagcaactgccacccatgggatttcgtttctgctttactagtgcagtagtgatgtctccagggcrtcgtggtgggcaggcggcccttgctggcatcgctccgcactggttggggggcggcgctgggcagcaggggtgggggaaagtgaacaccccctccagtctc

SEQ ID NO: 39999 - DNA, 201 bp, Bos taurus
tccccttcctcagggttcatcaggtactgactctgatctcttcactggaacacaagcttgggagccctgagggaaaggccaagctataagcacagattaarctgaagctccccccaaggcactggggtgggaaaggggcggaccaggaatgctgggccaaccctgcattcttggtgacttcagcgagccctcaccctctga

SEQ ID NO: 40000 - DNA, 201 bp, Bos taurus
gccccctggatgtttcaccatcacgtgtcaggattcagggaagcacgtgtagtcgcataccaccaccaaaccacagtgctccactgtggaaaggctccagyggccagccccggcgcctgtgtgcgcatcagaatcacgcacgatgattcccaaaatacacatgctcaatccgccccaacctcctaaatcagaacctttgtg

SEQ ID NO: 40001 - DNA, 201 bp, Bos taurus
gtctcctgcactgcaggaagatcctttactgtctgagccaccggggaagttctcatgcttcaaaataccacctgccaaatgatttttataaattctactaytttagagctgaaaagggtaaccaattattagtctagttctcgcatttatttatgggaaaactgaggccctgagatgttaaaggatttgctcaaagtcacc

SEQ ID NO: 40002 - DNA, 201 bp, Bos taurus
aagaaacaaatgcataaacacattactgctacattaaggcaatatggaaagtatactcagaaatctcagtaaagtgacagtgtaggtttctagctttaacrtagctagtattgcacccagtaaggtcatctaggtttcccaacatcctagaaaacccacaagctgaccagcgtccaaaattcccaagtgggagtggaaaaa

SEQ ID NO: 40003 - DNA, 201 bp, Bos taurus
tcttaggctttatagtttacagtaaatgcatctcagtacagattcattcattctacactgaaagatagacatcatatgtgttggatggccatttcatttcrttgtttattgcattcatgtcattcacctattcattcattcattcaaagaatgtcctatccatgggccaggtttgttacagcaacaatacagagcaaaagc

SEQ ID NO: 40004 - DNA, 201 bp, Bos taurus
ctgggcctctgacatgttacacctacagcaaagagcatggccttggagactgattccgtgagcaattctctgtttataaggaaggcaaatccactcaatcragggagaatgaaggggacttgtgggaaggatacagagaccctccctgaacccaagggcaggaagcagagccgagcctccggaaaacggacatcacagggc

SEQ ID NO: 40005 - DNA, 201 bp, Bos taurus
ggtgtgacacagcactcacaaagcacacacagaggaacaagcaagatgcgagtgtcgggaacagaaggagacaaggcagactagagcaggtggcctgctcrgcgtagcacaggacagacaagtggaaagccatctgggctcccagagaagacgtcaaatggaaatggcctgagccagagtgttaaagccctagagctccct

SEQ ID NO: 40006 - DNA, 201 bp, Bos taurus
gcctttctcaatgtttattatatgctaggcatggagtgtttggtgcttatctcatttaattctcacaataacttcgcagggtaaacattatggccattttrcagatggctatactgaggcacaacaccaaagtatcttcccaggcatcatactggtagtaaatggtggccttgggatttgaacccaggacatctgacaaca

SEQ ID NO: 40007 - DNA, 201 bp, Bos taurus
ttagtgtaatcggagaatgtctctttgtcccattttcactgacctcctcccaatatacacacatcgtgaggactgaaacacttctgaaaaatgctcaccarccacataaataatcagggaaggtaaaatggaatctgcaggcttaaaaggttaaactacttacaagaatgcttcgttgcttaataaccatttctctcatga

SEQ ID NO: 40008 - DNA, 201 bp, Bos taurus
aatacagtgtacaagctgctggcccactctctccaccgccccagggacacctggaaccaagctgtcgcccccagcacgtgctctgtacacacacaactcgrggagaacgctgagcctgcctggccaccggccataatctaggaacacagacgcccaagaaactgtccagggccaccatggaggataggaccctcgtcctta

SEQ ID NO: 40009 - DNA, 201 bp, Bos taurus
aactcccaactatcccttctgcccagcaagtctggttgcttcttgatgccaaagagagaggcaccttcatctcagattagggtttgctatacctctcaaargatgaactccttcagaaaacattcttggtgatcgctgacctgctcatagactcactatagctgttagaacgaggaggaacctttatactatccatcttcc

SEQ ID NO: 40010 - DNA, 201 bp, Bos taurus
gctgagatttctcacctggggaccggactgtgtgggaaggatgaagaaggctaaagggagaggagggggtctcagtttactctgccgcaaggcactgctcragaaaggatcttactgtctataccgtaatgtgaactcgcaagacagcaagctatgaactttttaaagtctttctcgaatttgttacaatattgtttctgt

SEQ ID NO: 40011 - DNA, 201 bp, Bos taurus
gattatacttcctctgacactctctgccaccatcagcccataagtgggtgttgccaaaattcagaagtgctgtaacaggacttgagttgtttgtttgtttktttttttttacttttggtaaaatggatttaatggtcttcctttgttttcaatgtaaaagagaggttttcctccaggatgacacagtagcaagtccctaat

SEQ ID NO: 40012 - DNA, 201 bp, Bos taurus
ggggaggtcctgctcgttggttccctcctgggcctcaacttgtttggggaatcttgaacagaagcactttgaaaggggtcttgggaagaaaaatacaatcrtacagggtcatctggtggcctgagtaggggcatttaggaattgaatatctacctggaataatggttgcatggaacattattctgcatctttccaagaatg

SEQ ID NO: 40013 - DNA, 201 bp, Bos taurus
atctttctatcatggaataatgatagatacgaaataacatctatcgtgtgtcgagtgtttcactgttttcagaatcacctcttattcattatctcagtggrtcagcacaattgctccaggcggtagcaagttcatgtttcaatagccccatttttatggctcagaaagtaaacgacgggcccaaatcacatattaagtgag

SEQ ID NO: 40014 - DNA, 201 bp, Bos taurus
acggggtgactatttggagctatggccttcgtggaaggaataaaggctcaggaggccatgcgcatggtgcttagatctgattgaactgatggccttataarcagagacaccggagcactctctctgtctgccctgtgggtcccctggggagtgggcagccagctgcaagccaggaagtgaacttttaccagaccctgacca

SEQ ID NO: 40015 - DNA, 201 bp, Bos taurus
acagaagaacaggagaattcggaaggcaatcttccaagattatggaagtcctgatcactagcgtgtgggctgactcgtaaccagacggctctgagcctggyggtctgtttattacttccatttagtcatcttgatagttgtctcatcagcctgattaggctccaggcttacttctgttttctcatcacccctactcttgct

SEQ ID NO: 40016 - DNA, 201 bp, Bos taurus
aaagaacccacttagtctctctcgcagacagcaggcatcacagtggacagtacactggcttcagtgacgagattaagacagccaccctgtagaggactccrctttctttcctgctccctccaaaacgttcggtggagaaattcagccatgacaggaccggaaagtgttggtagaggatgctgagacggggagagtccttga

SEQ ID NO: 40017 - DNA, 201 bp, Bos taurus
tgacataggtcacaatatgctatgaagaaataattcttgctttattcttgaagaaatcattctggctttaggttttgttcctttttattaaaataaggggraaaaaacgaagtaccattacaattgacgcctttatttctacacttgatatcagttaattaaaaagcaaagtttgctgcattccttgacataaagaagcca

SEQ ID NO: 40018 - DNA, 201 bp, Bos taurus
cagcacggttctgaaatgggtggggtggcctgtaaagagccctgtaagaggtgcattcattcattcacctgccatccagctagggctgttctgtgtcgggktctcttctcataaaggccagtttttgcccagagctggagataaaggatgaagaaagaggtgccagatttaagtgacctcacttatgtgaaaagggaaaac

SEQ ID NO: 40019 - DNA, 201 bp, Bos taurus
ctatgctctgggggtaaagctgtgctttcctgtacctgagacaatgcctggacctcgtgaacataactgacaacataattttgccgcacaggttattgttrtgttgttccaatatgcttgaagtgatcatgaatcttcacggaatgctgaacgttttcccacgggaaatactttattttgcacacagagccacccggtctg

SEQ ID NO: 40020 - DNA, 201 bp, Bos taurus
atgcctgtgtcacgcgatctgggcctccatcctgtgtgaccgcactgccatctccagtcgttcccaaatatgcacatgccttcttcccgtccacagggcargatgctaatgaacagggccatgctttgtctttctctgctagtctccctagagcccctggcatattagagcgtgcttagaaatgcttcagtgccagttagc

SEQ ID NO: 40021 - DNA, 201 bp, Bos taurus
aaggatgttcttttcttccagctctcgcttggagggcctattgctgagtttgatggctaaggagtccttcctgcacaccttcatggccagggagcctgcargagggcagagatgagttaatgaagtcatcgccaacctgggctccgggctcccccagagtcagctgtggcccacagggcacaagacagggagacggatata

SEQ ID NO: 40022 - DNA, 201 bp, Bos taurus
atatttactcagagccggattcataccctacttaactccataggaattcgcaacagttggtcttgacaactccagcagttctgagcttcattaacctattygcaggtgctctgctttccaagctgcctgtgctcagagaaaaaaaaaacaaaaaacaacactttcaaaattctctgacacagcctgccgcctcagttcagg

SEQ ID NO: 40023 - DNA, 201 bp, Bos taurus
aagtttgtttggggagacctgtgctaaatccataaacactcctgaaaggaagcacttaccaaagagctcagcaaacaccggcaggccctgaggcaaacatsagtacagatatcagtgtgaggagaaagtggagggacttccctggtagtccagtggctaagactctgcgctcccagtgcaggggcccgggttctatcccca

SEQ ID NO: 40024 - DNA, 201 bp, Bos taurus
acaaaacttcaccttgtcaagaaaccacatccttgactgagttaaattaggcaccaattaagcaacagggctatctttccataccccagcacaaggccaakcgtccttttgatgatctgttaataaggaagactggaaaacaaagagccctgtgtgactgatccattcattccccaggccccacggctgtgggagtcagcc

SEQ ID NO: 40025 - DNA, 201 bp, Bos taurus
cggcgggctacagtccgtgaggtcacaaaagagtcagacacgatttagcgactaaacaacagtgagggaacaggcttagaacgggcaaatgccttggccaygtcatggctgctaggcggcataaccagggtccacacccagctctgcctgcgtccagcctatgttctcaatcactgccctcgtcagacctgatcctttcaa

SEQ ID NO: 40026 - DNA, 201 bp, Bos taurus
gtactatgtctgttctctccatgccctttgatcccttctgtccctagtcaggggaggagtgacttgtctaaagggtgcattttaggaaaacaagctggctstgctgaattcagctcctcccactttcctcctgggtctgagccgccttctgcgtggtctgtgtaggccttcagcatagggaaggcctagttcagccttgtc

SEQ ID NO: 40027 - DNA, 201 bp, Bos taurus
tgactggacaaaggaagagaggattccttcaaaacactggattggccaaaaagttcattagggtttttctgcaagctaaatattaccccttggatgtatgyggtcaggggctaacttccttctttggctagccaaagataatacaggagatgaagcaagcttgtggacgttgatatggcaggacaaacaaaacactctctg

SEQ ID NO: 40028 - DNA, 201 bp, Bos taurus
tcactccctccatggtcagttgaatgggctccagaaaagaatgtgttttctggaatattagggaatatggtagtgaagagttctaaccttgaggctatttmtccaagttaaaatggtcttgaagattcccattaagctcgaaggttgggaactgggtgggtttctcctcttacattatgagacataagcgggtggctcctg

SEQ ID NO: 40029 - DNA, 201 bp, Bos taurus
ttagttgctttcatcaacactagatggtcccttcatttggggggccatttttcacaaagaagcacagcttgctgcagagaggcagaacttgagttctggcktacacctgggttaacgttctggcccctccattgactagcagggtgaccttgagcagattatttaattgatccatgcctcattgtgtttctccacaaaatg

SEQ ID NO: 40030 - DNA, 201 bp, Bos taurus
ctctttcttttatttatttattttcttttaaatatttatttatttggctgcaccagatctcggctgtggcaagcaggatctttagttgtggcatatgaacygtgaacccgtagttatggctgctgggatttagttccccgaccagggattgaacctgagccccttgcattgggagtgtgtggaaatcttagcactgggcca

SEQ ID NO: 40031 - DNA, 201 bp, Bos taurus
tttaaacgtagtcttttgtaccttgatgtgaacagagagttctgagcatattgtaatgcagaaggttgtggggctgggagttgtgtagttaaaagaaaaartttctcagccttggggagttgagaagacgagatgggttgctcaagtgtgcccggggactcaggttactgctagaatacagtttcctgtggaagggaaatg

SEQ ID NO: 40032 - DNA, 201 bp, Bos taurus
gggcagtccagtggaggggatggctcccgggaatgagtaatctgatacagacatctttcccctttatgtcacctgttacaatttggcctccctgtgcctcrgctggaaatcactagcagctgacagctgtcccaagcctggtgtctgcaaccaaagtgaagtgtagaacgctgctgaagttgggccaggattgacctttat

SEQ ID NO: 40033 - DNA, 201 bp, Bos taurus
atgccttgttttctcttctcaaatcaacatgtctccgtatttatacaattcagagttcaaacaacattcattgcactgctgtcactgtacgtaaagacaayccaaacttgttatgcctaaatataaaacacaatccaactaatcgaacagatctgtggcatgagcagagcctcaccatgctgttcccatttattgtctgcc

SEQ ID NO: 40034 - DNA, 201 bp, Bos taurus
tttattttctaccatggacagatatggatatcaaccagcaaataacaagaaataaagggggaaggacaggattagaagaaaagctgtgaacttgattttgracctactgagtttgagctttctacattatatccaaatataaatgtttgggggatctttggaaaaaatgcatgtgaaacttgagagagagatggaagtttg

SEQ ID NO: 40035 - DNA, 201 bp, Bos taurus
tcctgcatgcagggcttcctgttaccacacttgctggtgaccaccttcttcctcctgagagggactccctccctccctgccactcaggtctctggctctcrcagagccgcatggaaagagcgcccacctgctgcagtgggcctttgggctcaggtcaacccgcaggacacccgaggtgggtacatgaagagaggggagggg

SEQ ID NO: 40036 - DNA, 201 bp, Bos taurus
actgttggcgtgttatttacttttggccgcggtggcgtttcatcgctgtgctcgtattttctctagctgtggcgagcagggctgctctaattgggatgtgygggcctcattgcggtggcttctcttgtcgtggagtgcaggctctaggctcgagggctttggtagttttggcgcacgggcttagttgccctatggcatgtg

SEQ ID NO: 40037 - DNA, 201 bp, Bos taurus
tgagttttgactcccttgtcaactgagatggattgcaattctcagggagagaaagtacaagctgagtaactggaaatctgtgcctgccttcctgtggccayggagaggtgttagaacacgaaggtgatgactgctcaggcgctggtaacttctgtaacagcccagctgggcagctgagtggtttctggtttacagatggga

SEQ ID NO: 40038 - DNA, 201 bp, Bos taurus
taccggtgggacgcatcaagatggcctctgcctggaaggtgctttgtcttattttctactacagctgtgtgaggtataaggtgttttgcagaaagtattcrgggtactttttccaaatctaggcaagttcttcgtttcttagacccacaaaaagcagcacttagagacagtgaggcagtggaactctggctgatgaaacgt

SEQ ID NO: 40039 - DNA, 201 bp, Bos taurus
cttggttacgtgccggctcgggccatttcttcctgaatgccaagatgattcagatgtttaccgcaacaaaatcacgcccgtcagagtttcagcacatcccrtggagccagcaaggggccgtcagtgtctgcatcccaactagggctgcgctcttgttgtctgtgtccaagacaaaggtgtgatggtagcagccagtgcgcc

SEQ ID NO: 40040 - DNA, 201 bp, Bos taurus
ctctccaaagctctaatcctcactgcccaggtaagacaaggtatttgggccaagtgcatccacctctattggtcttaaattttatctacctcatgggttcrctgtctttaattactgtggccaccactgcatcggcttcgtttctaaaactctgtcccaaatgtaaacaaaatcattcttctaagttcgtacattttgagg

SEQ ID NO: 40041 - DNA, 201 bp, Bos taurus
ggatgagaaagttctcctggtcaccctggcagcgcggtctccctttgaacctccacaacatttagagtcaagaaaggccgtctttcggatgctgtgctgcrcaaggtatcacgcggaatcctcccaggagcctcgtgagaaaccgaggcccagagaactcaagtgactggcctcgggacgcacagcagcggccaccgggct

SEQ ID NO: 40042 - DNA, 201 bp, Bos taurus
taggggccatcgctctgctgggacagcctggctctgtccccgactagttttggtgacttggcggggggttcctttaactcctggtcccccattttcaaaarcgattcttccaccaactgagagaaagtctagagggacggttcctgcctgcttagtgctgggggcgaaggagcaaggtgacgggggtgttcgatcagcagg

SEQ ID NO: 40043 - DNA, 201 bp, Bos taurus
cagtcactaactgctccagccccctgcactgaggccccgccttctggattccacccatcagccatcagcacttcctcaccccatgtgcctggggcagagaygccacctctggcccctgaggccaggaaggtcccagcagggcccctcttggtctgcccagacatctgcttccctcgcaaaggaatcgcccgtttggtggcc

SEQ ID NO: 40044 - DNA, 201 bp, Bos taurus
aggggaaggagaggctaagctcttccatccgcattggagcgcacagcttttgcacgcctgccccattctcatgtctgctcttgagttccattttctctttygacgtttgtgtctgcttcagagcatctgctgtctttttctgcttccttataacctctgactcaccacggatgtatgtactttatggattttctctctgca

SEQ ID NO: 40045 - DNA, 201 bp, Bos taurus
tagcaacttggcttatagcaggtacagttgaaaatcacagattctgttcagctgtttccagaacctagttctaccacttactgggcatttgatcttggccrtttttattatcattacctctgagtttagtttgtgcgtattaaatcggataatgcgcatcccatcccgagcacggtctcctgtgcctggtccccgggccgt

SEQ ID NO: 40046 - DNA, 201 bp, Bos taurus
caaggactaattataccttgtttattttctctacagaatcagacccattttccaaacaccagatggcgtaaattaattgttaaaatagtagtaaggttgayccttataaaatataagcaagtcctttttgtttttgcaggatttttacagcggctccacagagtacaatgaagccttaatagaagcaggaacacaggttgt

SEQ ID NO: 40047 - DNA, 201 bp, Bos taurus
gaatgtcacgccaggtcctgttcacgtggagatgtgaggaaggtcgacgtgctttcaggaccatcaggggtgagggccctgcttctaggataccagactgygctccctgaggggaaggggctggtaagggcgaggaggaaagagcctggaggccagcggatgggcgaccaggggcctgcccacagcgccctcaggccagac

SEQ ID NO: 40048 - DNA, 201 bp, Bos taurus
ggcgcctgccttactgataacgttcacatttcctgtctaagaacaatgtggctaagtgtggtgtcattaaaaactagtttaaaaaaccactataggccacycctgagagtctcactgctggatgctagggctctcccaggagtcagatcacagtggggggcgggggggggggcagtcagctctgccctcagaagacgctcg

SEQ ID NO: 40049 - DNA, 201 bp, Bos taurus
ttctgaccccgagtctgaccttcatcctggcctggatggaccgtgtcagtcctcaggaagaacgcggggctcgggggaggacggggtagcccagggacctrtcctggaatcactggcctggcgatgtttccactggggccgcaagaagtctttggaaaatgtgcctttaaccagaaaaggggtcttaacacttcaatagtt

SEQ ID NO: 40050 - DNA, 201 bp, Bos taurus
ttggatataaagtagagtaatacacgttaaggcaaaagaagcctagtaaacacactcagaggtaaggggactggactgtgatgactcagtcctgaggtgcrgagccgtggtctgaactgaagcttctccaagctgcacgcttccttcttcttgtgctgtttcccacagaaaagttgtttgtttagcatctctccatagtgc

SEQ ID NO: 40051 - DNA, 201 bp, Bos taurus
cacgtcatgagcccgtcccagagcggggctccggaagctgcgcctggaaggtgctgcgatctcagccagcccgggagactcgtgagctgccttccgcctcygccggcctggccgcctggagacccacgaggggtgaagggggccgaggggccgcatggggaggagctgctctcacggagcccgtctttgcaggtgttcggg

SEQ ID NO: 40052 - DNA, 201 bp, Bos taurus
tataggtcacttcacgttcacaaatgccctgggccccttcaggaaagaaattggcaatcaccaaggaaattgattcggattacttcaggaaatacagatayaagatggccagaaaaccacatgacccagtccagtagggaagaaaatctaaggtgggtatccggcttcccgtcattgcagggcacttcccaggaggccccc

SEQ ID NO: 40053 - DNA, 201 bp, Bos taurus
aggaactctttaaaaatatgataattttcttctaggataatgatgtttttgaatgccacacagaaaacagcctctttctcaccgattgtatttctgtaaaygcacttcagaggagcctacttctcccttttccaccttaattcattcattagtggtggtttcctttggtcctctggatttcctttcatcagtgaaggagca

SEQ ID NO: 40054 - DNA, 201 bp, Bos taurus
aaaacccagagtcactgcttgatgctttccagcaggttatgtctttttgctaattggagaaactggacatttgtgctatttcactggttcacagttacatygagcatattctagagggtcatacacccatgtacatgtacatgcctgtatgtatgcatatgcttccctggttgctcaggtggtaaaacgtctgcctgcaat

SEQ ID NO: 40055 - DNA, 201 bp, Bos taurus
catggcctcccaccctcaaccccttgacctttcatttatttttaaaatttttactgcaacctgggattctcttgtaagctctttccttttctctctacatkcactatcacatggccgaggacttattccctcctatagaacatattgaagtgcaattcctacttctgtgctgagtcttgagtctccaacttccatccactc

SEQ ID NO: 40056 - DNA, 201 bp, Bos taurus
tgaaaacccattccagtactcttgcctgggaattcccatggacagaggagcctggcaggctacagtccatgggattgcaaagagtgggacacgactaggcmcatgtttgcacacagcatgcctacatcttagcctatatcctttacatcttctcctctcatcagaggtacattctccttcctgctgtctaagaccaacatc

SEQ ID NO: 40057 - DNA, 201 bp, Bos taurus
ttcttaccagactttacagagacactgcaaggttctccgtggggactgagaagagcgtactgcaccgtgcctggatgaggaggttgataatgagtgatgcmggaggttaaaagtactgccagtagcagcatcctcatctctagcaacatatacaggaaaactagcatccagccccacaaccccagatgggtgttatccttt

SEQ ID NO: 40058 - DNA, 201 bp, Bos taurus
atcatgaacaaacaccatgctgtcagtgaattttcttgatttgctctatggcaaagaactaaaaactgccatctggcctgtgataaaggaatacttcttaycaccatggaaatattgggcatccattaaattatgacattaccatccagtattgggccaaaataaaacagctgaacaactagttttaaagaggtttgtgtt

SEQ ID NO: 40059 - DNA, 201 bp, Bos taurus
aacacttttgaattgtatctctaatgattgctcccttactctacttattgtacttccaaatgcatctattacctcatctccaatataagaatcctgagttyaaggcctttctgaagatttaatcagtactgaatatgaatcagaaattttattggctttaagaagaatcattaggagaaatcatcttttccaacattaaac

SEQ ID NO: 40060 - DNA, 201 bp, Bos taurus
atcaaatcccttcacacaatatcttcctttcactcatttgtagaaaatgcaaaggatatcagggttgtcagaataaaaaattcttttcctttaacaacagmactcaggagtagactttagagctataaaaggaacttcagagactgagagaggaagccctaaattgtttatcattactgtgtggggaagataagacaagtc

SEQ ID NO: 40061 - DNA, 201 bp, Bos taurus
atcagagttaagaaatctgtcactcagtattttgaagagattctgaaccacctgcaagatggcatatgctaaaaattagtcagattttagttactaacctraaaaaaataaccgcattgatgcacctgatgacatctaagcctatctttcaatacacatccccaactgcctctcctgccatttaatttctttataaaataa

SEQ ID NO: 40062 - DNA, 201 bp, Bos taurus
ctgacactgctgagaatcttgaatcactaaatttctctcatccttcttaccaacagaaccagctccaatttcactgacaaaaatgtggccatcagttaaaytgatagtactaaattatgtcacctgacagtttgtgcatgcctgggctttttaagcctttcctgcaacccctaactgtctccaggccaatagcagtagcta

SEQ ID NO: 40063 - DNA, 201 bp, Bos taurus
tatccagctcatctaactactaatatttccctgctgtttttagaaagcacttttgataagaaacatcatttttaagatggcttaaatatatgaacaggcaygacaagatctggccaaaatcaggcagcggataaaggtcacgattttccccacaagactctattggatttatatacagaactcacagattttacctctttg

SEQ ID NO: 40064 - DNA, 201 bp, Bos taurus
tttaaaaaccaccatgtgaagcaaaaacaaaatctttatatctaattgaaaaagttcataaaaggaagaaaaaaattgaatcacagctttgcaaagcttgrttactagattgctgtcaggaataccatttctatctaggacatcataatacttacagaatttttatctttcatagatttctgtacatacgtcattaaaata

SEQ ID NO: 40065 - DNA, 201 bp, Bos taurus
ggaaattatcaatctctgttaatccttctatacaatgaccttacatttgaaatgcctactgttgcgtgatgagttcttcatgcaattttgggcaaaaattytcaaaagggaatctggcagaacagcatcttggctcattcattcactggggactctgaacacagagaaaggttgctgtgttctaggcactgtttcaggtgt

SEQ ID NO: 40066 - DNA, 201 bp, Bos taurus
catgtctggggagtgcccactgtggttgggacctgcaagaggtcaccatagtctgaggcggctcatgcacttccccaggggagttggccctgcattgtggracccttgtggagccaagctgctcaggcttccaggaagatgtggcagtgatccaccccagttcacagcttgacagtagctgcaaacccttgggctgggact

SEQ ID NO: 40067 - DNA, 201 bp, Bos taurus
caagcccagatttctattgttccatagttccttcctttttctcctgaattaggtttcatctccatatctccacttaaagataaattatgctcataagaagmagtgcagacagactttgaatttcaatttagttttacttccattatattgcaaatgccttcaaaagctatgctaatctgttattttaaactgctttattac

SEQ ID NO: 40068 - DNA, 201 bp, Bos taurus
aataaggagaaagactttccatggcaaaaagagtgaaaaaaaaaaaaaatccagagagtgtatcttctccatcagttgtggccccacctgggagaaagccrtggggtttgagatgcagttgtctgccaaatcaaaattgggatctgggtgaatgagttttcttcctctcagccctgctgagcctcattttcagagctcgaa

SEQ ID NO: 40069 - DNA, 201 bp, Bos taurus
tggtgcatggagggcaggactgggcggcagtatttgctggcagggagtaggggagagattgcccacatcagatgggatcattagttaccagggaaaccagragaggcatactttggtaggaatagtcattaactggggcctgaggcaagttacctagaaaggtcagtcatgtacataagttacagctgaagcaagcactgg

SEQ ID NO: 40070 - DNA, 201 bp, Bos taurus
tcatactgtaaagtaaactttttgcagtctatttagtgtcacattgttttgcatgtttgtattttttattggtgacttttctgttaaatacaggccctagsgacttccctggcagcccagtgattaagactcagtgcttccattgcaggagcttggtcctgttcaggaactaagttcccacataccatgcagcgtggccaa

SEQ ID NO: 40071 - DNA, 201 bp, Bos taurus
caactgatccttgaattctcagcagtaggacttgaagaagaaagctgatacacttggctcaagacaaaattggaagctgtggaggccagcagagtgaggamagctctctttctgaaagtcacgttaataatttgtgaactgtggtgtctgctggcctgtaacatgtccctgtgtcaggttttgtcatgttcagataactct

SEQ ID NO: 40072 - DNA, 201 bp, Bos taurus
aagcacacacacagagttgtcttaccagcaacacatgcccagagagttcccctagcaaatatcttgcaaatagctggtgctcaaaacatgtttcatggttsagaaaagatgctcaacaccactatttattagagaaatgcaagtcaaaactataatgagttatcaccttacactggttagactggccaccatcaaaaacta

SEQ ID NO: 40073 - DNA, 201 bp, Bos taurus
ccccaagtagctttattaacaatcttctaaagtctctttgaatgagatgaaaaaaccatatacagcacatttttcactagggcacagcgctgtgggccccmcaaggaggtgaatttgatatgatcaggcactgggtacagcttcaataaagagatgttctttaaggcagaatttcattaggtgaaaatgtggccaaagggc

SEQ ID NO: 40074 - DNA, 201 bp, Bos taurus
accaaccacagtttggaccagggtatcttgtgacctgtaagtaagttctctataggatgggtaaaagagagtgtcatgatctatgacataacttggccaakttttcatgtcatcaaaagacccatgtttggatcttttgtgtgagtgtgatgagttcttaaggtttcctacttatcactgcagaaagtaggccctttattg

SEQ ID NO: 40075 - DNA, 201 bp, Bos taurus
attggccccaggttgtggatccctaggaagggccaagctgtttaagctccaggaaaagtgtgggcctgctcacagtctagtggtagctgccacctctggcrtcaggactgtatcagctgtttttcatctgcggcttcaggcactttccttaactttgacagtggcagtcatgtctaactctgcaggtggcactctaactgg

SEQ ID NO: 40076 - DNA, 201 bp, Bos taurus
agccattgtgggaactgacaagtgcagaattagtagggcaggctagaaatttgggaacagatgctacagtcttgaagcagaatatctgctccttctggggwtactcatgttgtccttaaggcctttccactgattagatgaaactcaatacattacagaagataatctcctttacttaaaattaactgattgtacatgtta

SEQ ID NO: 40077 - DNA, 201 bp, Bos taurus
gtttctttataaatttgcattacatgaataatgccttgaaaaaggtgacctcctctggcaaccctgtataaggccactattcttaatcactctcttctggrtatccaagttcacagcctttaaatgacaaaaagtatacaggttttccacagctatgtcagaatctgttctgggcccattaagaaaagagtgagtatttgg

SEQ ID NO: 40078 - DNA, 201 bp, Bos taurus
ttgtctcagactgcatagataatgaaaaatggcctgcttacactgcaagagtagcaaaaagatatgtttgtttgtgtgtgtgtgtgtgtgtcttgtctttkgggccagaaaagaagtagaatgactaacgcaaacactgaacaaaattaatacatatttttatcatccttaatttctaacaaattgcaagaaatgactgga

SEQ ID NO: 40079 - DNA, 201 bp, Bos taurus
ggctgacattaagaccatttaggaggctgatgagttaatttaggtgtgatgagataaggggatgaacactgatagtgtttatccagcaggtcccagacacrtgggacattcttccaatctccttcctaacactgcatgcctgacccctggctctactcttctccaactctacaaatcgtatccacttttaagtttcagaac

SEQ ID NO: 40080 - DNA, 201 bp, Bos taurus
tttatccactgcttgtattccaggaacaaaacccattgtcttatagttttctgttcttattttctttgcttgtattttttagcatgcttcaatcaccttckcctacccacataattagtaaataatctcccacattcatgaagccacttaatgatcaaatattttatattcactgcccaccggaatataaatcattatcat

SEQ ID NO: 40081 - DNA, 201 bp, Bos taurus
tctatccaatatatcttgcataatccaacatatgtaactttcaacacagtaggcaagactcacaaaataaacattaatatcctctcaaattagagactgcytgttattagactacaaggtttgattgttttttatttttccttgccccctgttcttacagttaagagttgggtagttgctggttttatgtaatagcaattc

SEQ ID NO: 40082 - DNA, 201 bp, Bos taurus
agatgttccatcaaaagaaaatttaaaatatagatatgaatgcaaatgatatatttccttctaatattgtaatgagttatattgtaaaatttattgtacartattgttattgttatattgtaaagaacacttgattgtaaagaacactttaaatattgttatattgtaaagttatattgtaaacaacacttgagtagaaaa

SEQ ID NO: 40083 - DNA, 201 bp, Bos taurus
gggaaaggctacccactccagtattctggccaggagaattccatagactatatagtccatggggtctcaaagagtcccacacaactcaaagactttcactytcaactcaatcttaagagtcagggaagagtgtctgtataaacagtcccaatataggtttcaactccatgtgattctttatcttcctgctcatctctggct

SEQ ID NO: 40084 - DNA, 201 bp, Bos taurus
ctgtcagtctacattgggaactgggatgttactaattctgtaaagcacatttagtcctgtgaaaagtggtatacaaataaaatgattgatgtcctgtcaayaggaacttcacgaagaggatcaaacagagcagtttcttttgaagaagggatggaggttaggggaaaggtgttagattttacttttctatcataaacccca

SEQ ID NO: 40085 - DNA, 201 bp, Bos taurus
cttcctaaaaccatttgtttctcaattttatcaattggtattttcttcagatatacaaatcttaggttgctttctatctttaagaaatttgcaggtactgyctggtgctcttcttgtgttgacagtttttgtggagaagctgtggccaattttcttctattttattcccttgtacatgtgaagcacttatttctcatgata

SEQ ID NO: 40086 - DNA, 201 bp, Bos taurus
ttaatttgacattgaaagtcttttgcatgcaggccctggtttatctttacaaaccaaaaccctgcttttgtcattacaaaagttctgtgcctagatctctrtggcccatcaattctcctgatggttactcctttgccaactctactgctttatcgtgtagttctcccaactgacctggagaaggaaatggcaacccactct

SEQ ID NO: 40087 - DNA, 201 bp, Bos taurus
ggcatgcgctgcaattaagtaaatgaatgaatgaagtacattgggatctcagttgactgtgttatctacttcaagaattgctgggagtaggaaaaagcacrcaaaatgtctcacttactcctccctgttggccccattgttcccattctgccctctttgtttgtacgtagaagaaggctagcatcaggaatgtttcacgca

SEQ ID NO: 40088 - DNA, 201 bp, Bos taurus
atggcaacccattccagtactattgcctggaaaatcccatggacagaggagccttgtaggctacagtctatggggttgcaaagagtcagatacgactgagmgacttcacttactttgctaagatagcaaagtatatttagaatcaaaaccaaaccaagaaaaacaaaatgaccatagaatatgggcaccattggcccatca

SEQ ID NO: 40089 - DNA, 201 bp, Bos taurus
caaggcagaatctgggtttacctaatcatatgacatgactttgagtggatggagctaagggaaattgcttcactgcatctggattactcacatttttgaaygtccatagttttatgagaattgtttgaacacagaatcaatatatagaaacttgcagaaaaagataatagttaaaaagagaataaaaagaatagccaagaa

SEQ ID NO: 40090 - DNA, 201 bp, Bos taurus
tatccctcgcaggtcaagtcagttccagggtcctggatttggttttgcagctcgaaggcggtgtcctcgcacccgtgaaaaatggccacataatagcccayggtgcccagggcatagcagtcagaggacaccagcaagtagatgagcagtgtcacaggacctcccagcaagaggagggcagtgccaggcccagggctgccg

SEQ ID NO: 40091 - DNA, 201 bp, Bos taurus
atacatccaacaaagtaaaaagaaaaataagcatcctttccttgtttatgtgttgttttaagtgatttccttcgatgcttcgagcaccgtatttgtttccrtggggcagatacgtgccctcccctttgtcttgatttgagatagagacagaaggatcactgcactctccttcttactcacatagcagacgatccacgtgtc

SEQ ID NO: 40092 - DNA, 201 bp, Bos taurus
ccttctccaggggttcttcccaacccagggattgaacccaggtttcctgcatagcaggcagatgctttattgtctgtgctaccaccaacccacgataggarcatatatatcaataattgctttaaatgtaaatggattaaatgctccagccaaaaggaaaagactggctgaataatgatgaagggatcaattaaagagaaa

SEQ ID NO: 40093 - DNA, 201 bp, Bos taurus
ttttatctatcaacaggactgtaccatgggagcccaaacatttggccaaagatttttctgggtgtgtctatgaggatgtttctggatgagattaacatttyaataggtagactgactgaagcagattgccctctttaatttgggtgggtctcatccagtcaaaggaagactggaatagaacaaaaagactgaattagaggg

SEQ ID NO: 40094 - DNA, 201 bp, Bos taurus
acgtagatcaactcctaggaaatcagctatgttaaccattatgccaccaatgctgcatcataaatgcgttagaaaaaagcaaaaggcatcagaattgcagrcattctgtcaagtcaagaatttaagtcccaaagaagtgtctatccaagttcaccagctagtccctggcatgatcaggataaacctacttctaaacctgtt

SEQ ID NO: 40095 - DNA, 201 bp, Bos taurus
gttattcacattgtctctctgacccaacctcagaagtttttgatcgtttctttgttttctggtatgaaaacatatcccagttcatagtaaatattttctgkcacagatctgaaacctaataatcctattttctttcagtgggattggttattttgagaatattatgtgacttgtagatgtgctcatagctagtggtttagt

SEQ ID NO: 40096 - DNA, 201 bp, Bos taurus
ctacagatgtacctggccaacatggaataataagatgatcaactgcagactcactttcaaaatgtgatacgggctctgaactaatgaccaatatgtagtaytattccttccatggccataaagcatgagtttggaaataaagaggagaagggggggactaatctcgctgttatacctaataaatcacacaaaaatttttgc

SEQ ID NO: 40097 - DNA, 201 bp, Bos taurus
aaggcctggtgaagtacagtttggtcctgctgataaagggaactagctagggggagagccttttccactgagtaggaggtatatctggtgagagaagcagracttatggttataggccttagggaccccgtgaggctccaagatgtcaaagcagcatttaatattgcaagttaatgtcaagcctcccattacaacatgaaa

SEQ ID NO: 40098 - DNA, 201 bp, Bos taurus
gctttcagtggctttaattttcaatggtaagcacagcttctatatagtgttgtcaaaaccgcaatgaagtcatgtcattgaatattaaaggcccggcccgyggaatgccaacacagagatttgaatttcatgctcgctcctaaacatcaagacaaatatgtctaatttcataaaaacccggccagccccagggaggctgac

SEQ ID NO: 40099 - DNA, 201 bp, Bos taurus
ccgagtgaatgtgagtgccctcccaagggtccagagagcaccccgcctgacagtgcatctctgggtcctgccagcccacagcagtgcaggcactcggtggmaattcccttgggcctgctagcaaggtgatttctccattgctcctggctatagttgttcatttttttttcaagttttgttttttggtgttacgtgtttagc

SEQ ID NO: 40100 - DNA, 201 bp, Bos taurus
gtccagcgatgaggcggtagagacctggccgacccactccgccctctccccacccatcccctggcttctcatcacagccgatcccccagcctggcaggaarctcagggcctcccgctgccctgcgcagctacgaggactccttcccggcctcccagcagctgtgaactgcgcatgccctgtccaaggcggacagcggtggg

SEQ ID NO: 40101 - DNA, 201 bp, Bos taurus
gcccacaggcccacttcagccctgcctgtcacaaggtgtgaaggaccctggaggcaggacccaaggtgggtggaggggcccaaatgactgggaccctgccyagctcctttccctgtcttctgtgggaagtggaggtgccgggcattgtctaaagatggaagggagccagttaacctctgtcaggccgtgtcttgggcacat

SEQ ID NO: 40102 - DNA, 201 bp, Bos taurus
aaaaggaagtggccctgcgccccagccatgaaccccccacatagggaaacttggagcctgggggcccacgtctggtctctccaccagcccgggcccccgcytgtctcagtctctctctggcaggacgaaggttggggcaagtgtgacagcccgtccgtgagacgttcatttccactccgtgcagagcaggtgcaggccagt

SEQ ID NO: 40103 - DNA, 201 bp, Bos taurus
ggctttggagggccttgataaaatgcttctatcctagaaagaaagcctcttcccctcagggtccaccattagcgctctagaagccgctggttcaaggggarcacagggccttgctatgctgggacaagagactggggacagctttttatgaaggttagaaagagggctggatctaatcatgggtgctccccgagtagagct

SEQ ID NO: 40104 - DNA, 201 bp, Bos taurus
tccttgcagcccctgcctcttatcttgtgcaaagatgggagtttctccaagaaatctttactgggaaactaagaggaaggaaacaggcagaagcatgaacrtgatcaggtccaggcaggcacccaagtcccttgtcccaccttggagcatgctgggcttgagctgagggcaggtgcctggctgtgtagttctgcaggggga

SEQ ID NO: 40105 - DNA, 201 bp, Bos taurus
taggtgagccgccattgctcagatgctgcgactgtggtcacgagagcagggcctggaggtgagtgcccaaaaggaccggctggagtgacctcagccctccmgccccaccctgagaaagacaatggccaagtcaagaaaggctggtcctgtgagaagatgtgtcacaagacaggatgaagatgtgctgagcaaaggggatgt

SEQ ID NO: 40106 - DNA, 201 bp, Bos taurus
cacataggccacagagaagagggaaagcaaagaataagatgatatgaaagaaaggaagcagcagagaagggagaaaaagcccagcaggagagaggagagawgcagcaggcagcgggccctgctcaggagggaaggaagctgccccagacctcgggatcctccaggagacaggccccgtgctctggcttcagccctgcgtca

SEQ ID NO: 40107 - DNA, 201 bp, Bos taurus
taacccctaatatttcagtgcatagatatgctgtaattttaaccactctccttttcttagatttcttctaactccccatcacaaataatgctgtacagaayatttttatgtgcacagtatctctttcatttttagagctacttacgatatgtaccagagaaggcaatggcaccccactccagtactcttgcctggaaaatc

SEQ ID NO: 40108 - DNA, 201 bp, Bos taurus
ccctcgccacttgaaccagtgtctggcttcgtttatctttgacatcaagtctagcctcagggactcatctttcttggggccgttccccactgcaaccactyctcttccccacctcaactgagaagacagggctgacccccctcacacacaccccacgggccagtccgtcctctccttctcccagagctcctcttcgtcctg

SEQ ID NO: 40109 - DNA, 201 bp, Bos taurus
gtttgagcattctttggcattgcctttttttgggattggaatgaaaaccgacctttttccagcaaagcaaaagcacaggtgctaaaaagggaaacacacgygcctttaaaggaagatcccttcactggagaatatttatacaccagtcttccttctcagactcatattcttcagcagtaagtggctatgacaagtcacctc

SEQ ID NO: 40110 - DNA, 201 bp, Bos taurus
accaccaaccaatcagaagacagtcccacacctgcatccttcactccagatttcgcctataaaaactcttccatcaaggccatgtgagagtttgagtcttkgcagcatgaactgcctgctctccctgcctgaccctgcagtaagcctctgtctgctccagactccaacattttggtttgtttggcctcactgtgcatcgga

SEQ ID NO: 40111 - DNA, 201 bp, Bos taurus
caggatcctatggaatgactaatttgtgtgggggcccagcatacatgaaacctcggtgcctgcaagagtgatgtttctatttcccccagtcctgtggaacycccacagtcaaaacccactggccttcaaagccaaatattctagagattccccctccctatgccagtccctcaggctgtggagcctgatgtgtggggctca

SEQ ID NO: 40112 - DNA, 201 bp, Bos taurus
cgtgaagtcagtagaacatgtacatttcatgtaatgggaaaacattgccttcttgacagtgagtagagcttcagtcatcacagaaggaaggtatgtgagaraattttttagaacaacgtgtcttcatagttatgatttcttggattgtggttacttttatcataacaaccatatattgaaacctcggtcttggaccatgtg

SEQ ID NO: 40113 - DNA, 201 bp, Bos taurus
tcaacaaggccaattgctgcctccagaatgcacaatgccttgcaatgcagttgggagcacccgctgggacacagacacactcgttttctcacactttgcayacttccttcctgtctggccctattccctttagcccaggacatctctctcaagatccaactcaaatacagcaggatcatgtctacagaccccagaggcagg

SEQ ID NO: 40114 - DNA, 201 bp, Bos taurus
aacactactcggtcgtgaaaaggagtggcattttgccatctgcagcaacatggacggacttggagagtagtatgctaagtgcacaatactgtatggtatcrcttatctgtgcactctaaaaaataaaccagtgaatataaaaaagaagcaaattaatagatactgaaaacaaaccagtagttgccactagggagaggggag

SEQ ID NO: 40115 - DNA, 201 bp, Bos taurus
tctgtctaaaaggtatagcatttttcattcatactgtatactggtgtccatgtattaaagtgaaacagagagttagggcaatcatttagatgattcagggraaaaaaaccacaagtctccagttacccagacagttctgggtaaatttatttttgctacaaaatattcagaaagttacttgatctgtatatatccatgcaa

SEQ ID NO: 40116 - DNA, 201 bp, Bos taurus
caagtgattcaagaacagaggtatacttatgcttagtcaatttccttgtgccctgtggcccacccaagggcatagaatcccagagtatttatgggggactkgttccaggatacccccatcctgcagatgccagcatccatggatactcaaagtcccctccagttgagcctcagtatccacagattctgaatctcctgatat

SEQ ID NO: 40117 - DNA, 201 bp, Bos taurus
tttgggcaagctaggagaagctttgtagcatttgtagcatagcaatcttatataatctgataccaatggttgggatttagaagatgttaagaccacaggtrtgggaagattatataaaagaggctgacttagcttttagataactgcattacagtgttaaaacacttcaccatctaatagttagaatttactcttgctttt

SEQ ID NO: 40118 - DNA, 201 bp, Bos taurus
attgcaaatattttagaaaaagtgtcaggaacttttctcagcattttgcattcagcatacatatactcaccacggtcctatgatgtaggcactgttatgaytctcattttcagaggtgaacatttctaagcaaaatttcccaagagcacacaacccattaagggttacatgctgggctgtgagttcagtccacgtgggtcc

SEQ ID NO: 40119 - DNA, 201 bp, Bos taurus
gtggtgagttccctggatttttgcattgctccatatataccagacaaggatataaaaaaccagaaactcagatatgccaaaaggcacagataaaaaatggmaggccaccaaaagcatgctctttcagccaaaggaccaagaaaggagcaacaaagcaaaacaaataaaaaaaataaacttttataatgagtaattgctctc

SEQ ID NO: 40120 - DNA, 201 bp, Bos taurus
caacctccactttaggcttgaacctcttcattctctgttgcaaatgaagtcaatttctttgagaagattttgagagctgccttatggcctgtttctccccyaggcagtctttaagccaggactctggagctgagggtagaaataatgcatgtaaccttctcactgactgacatagtaactcaagaagctgagtgttcagtg

SEQ ID NO: 40121 - DNA, 201 bp, Bos taurus
aaacctagctacagagagaggctgtccagtttggggctaatagtgatttctctttgaaatagaaagatttaactgtgggcctgaaacacaaagggggtgtrgaggcagctggtaggaatgaactttccctgaggcactgagaagagtgtgctgaagattattatctttcaagatggaaatgatcataccgctcagaaaccc

SEQ ID NO: 40122 - DNA, 201 bp, Bos taurus
gggcctgtgcagatttgtactcagttgaacacaagctgcatattttccttcctttccacaaacttaaaatacatcagtgttcataacagctctacatgcamctgagatagtgttatggcacttatatctaatttacaactcatttattcctcctgcttatctcatatttcagggaccagtgtcagtgttagtatggtggaa

SEQ ID NO: 40123 - DNA, 201 bp, Bos taurus
tctgagatgaaaagaaataacacaaaaatatgcattggattcctctcttcatggaaattattttgtgatgggaaagataaatatctggattttaaaacctrtaaaggtatttttcaagcatagccagactagaatgttcttatttggtggcttgtagccaacttactttagaagttagttttgttttttatattgttttat

SEQ ID NO: 40124 - DNA, 201 bp, Bos taurus
tgcttaatatttaaagttttacaagagtttaatattcacattttagagagagaaattttagctgtaaaattttgacccggtgttgttaaaattgaaaggtygcaaaaatataaactcgatggaagaatattatttatcataccttcaacatttcaaaattaaaatggttaggttagaatatttgtatttggtgaccattgt

SEQ ID NO: 40125 - DNA, 201 bp, Bos taurus
ttccttggtgctctgaaccaaatattttgtagtagttttaatggctcttatgaaatgtctcttaggttgctaagttttatatagcttagttttaatgtctyttaggtagccaaaatgtctcttaggaaaatcagctttgaaaacatcggatgagcatttgttgtggaatagtcacaagaaaactcattttgtcactgagta

SEQ ID NO: 40126 - DNA, 201 bp, Bos taurus
ttcaaattcttcctttggcaatcctaataggtattttaaaaatattcatttaatggcacggtggggtggtgtattttggaaaattttgaagtgatgatgamaagaaaaaagagatgatacaatcagaggcttagaagccagaagcacaaagtcaaaggtgacacgtctttttataatgtttgtggtaaataattattaaaa

SEQ ID NO: 40127 - DNA, 201 bp, Bos taurus
atcacagccttcgaatctaacctgtggccagaagaaggtacccagatggtgaggaacttaaacaccttgacacattgagaagtcattgaaggagccagacrcatttagcctagaaaagagaggcctatatgatacaaaagtcttatttaacattaggactgactgtggaagacactgatttattatctagctagtccaaat

SEQ ID NO: 40128 - DNA, 201 bp, Bos taurus
agagagaaagacccaggttagagaagaaaagagttattgaaaatgtaggggcattgttgaaaaatgcagatggttggatgcgtgtggatgtcttgtgtgcrtagccccctgacatagtgtgcaccgtcggctgtcaacttgaaattttctgtacagtggctcctgagaggttttgttgttttttattttttaatcagctaa

SEQ ID NO: 40129 - DNA, 201 bp, Bos taurus
atgccaattgtattaaagaaaatgacccatatatataacttctctggaagaaaaatccaagaaaacaacagggctggcctctgcagtagggaactgaaagrttgagagggatttgaggaaaacttattcttcctgcagatcattagtttttacaagactgtacttttacaaaacatggccaataattactttttccaaaaa

SEQ ID NO: 40130 - DNA, 201 bp, Bos taurus
aatgttcagttctatctagagatgcagactgagaatgtgtgtcaagaatacaacacaatggggtaggactaaggaaaaagtcatctacaaattgaagcttragtggcctattctattctaggcagttgtctgctgctgctgctgctgctgctaagttgcttcagtcatgtccgactctgtgcgaccccatagacggcagcc

SEQ ID NO: 40131 - DNA, 201 bp, Bos taurus
ttctttcagtcccgccaacttttgtcagcaacttttctcaatacctatgtctaatttgagaaagaaagaagggagaggaggagagagaaagagaatgaggrtgaaggggaggaagtggggaggacaggagggagacagacttgatgttgaactctgtcactttctaggaataaataataatcatctgtagattcataacct

SEQ ID NO: 40132 - DNA, 201 bp, Bos taurus
aaaagttcaaaggcagtctgcaggcagaatttcctcttcttctggggacctctgtctctcattgctttaatccttcaatggattagatgaggcccacccayaggaggagcaagtcatctgctactcaaagtctactaatttaaatgttagtatcacctaaaatactttcacagggacatttatatctgtgtttgacaaata

SEQ ID NO: 40133 - DNA, 201 bp, Bos taurus
tacaaatggcgtcagaacattaaaatggaacttcttaaagcccaccaaaggaagaaagaagtaagctaagagtaagactatctgggacatcttggaaacgycacagatttatcttcttgtggcccagtttgattccgaaagaaatccggagatgagaaaacccataactgggtttttgcttgctttatggaatgactttga

SEQ ID NO: 40134 - DNA, 201 bp, Bos taurus
ttcaaagcattctcttgtaacgtttttatatccaactgagctttcatccttcttcatttgcataaatttttgtccagaggtttgaaatgtgacaattgtayctaccatagaaaaattttcttttatagctacgtcagaacagtattaaattactttttactctttgagatatatcctctctcaatggtgccagtgagcttg

SEQ ID NO: 40135 - DNA, 201 bp, Bos taurus
tccccttcctccatcatggcctcattgggacacaccctagcaggtgtctatgcaatcatcacccacttgctcacatcagcccacatcagaattatttttcygaaggccaagcaatactctctggtgtttgttcaacagttggtttatattactcatctgtgaagcatcttaagatgccccatgataagttgcttctcctcc

SEQ ID NO: 40136 - DNA, 201 bp, Bos taurus
ttctgcactggtgtctttctgaattttagtttaaagctcattagcctatttgtctgttttttgtgcaaaaaccatgctggaaattcttggttggcccagcktatattttgacaaatataccaatatgggtccatcatgtttgagatcagattaggaatgcccaccctgctgaatttgactcaagacaagatttattttaat

SEQ ID NO: 40137 - DNA, 201 bp, Bos taurus
gaaagtctgcgttattgtttacatttgggtataatgacagcaaccaatgtatagtgcaatacagtgtaaggaattcatgtgtatatcatagactacttgamgtagaaccaaatggaaaattgtagagaccttgctctaatgtaatcttcagttacctgattcattaatcatttgtatggtacttaaagactgctgttctcc

SEQ ID NO: 40138 - DNA, 201 bp, Bos taurus
gatttagtcatttcatgtcaaagtgtgatccagtacagagattctaatttgagaaatcgccggggacccaggcttcttcctttttaagcttggccatcctytcaggttcaagacactcatccttgtgtccaaatgacggaacgcacacctccacttttctagagcacagtctgaatctcacctgtgttgggttggccaaaa

SEQ ID NO: 40139 - DNA, 201 bp, Bos taurus
aatactgacactttgttaaaggtcttgggcaatcagcaagactctcattgtagtggaaacacacaagggttaaggcttggttgcccttttttatagtctamagtagtctagtggtggagtaatcagctcactgcagtttgttatttcgaatctattactgccacccttgatagctcagacggtatagaatctgcctgcaat

SEQ ID NO: 40140 - DNA, 201 bp, Bos taurus
caaggtcaggaaacagtgaaatctaacaactaaaagtattaaactagaaacttaagatacctggattttagctctgagactctgtaaaagaatttttgatmtgagggaagtcataacatttctgtgtgctttggtttccgcatctgtaaaacaaggacaattcatcttcttcattagaatgctgaacagatgcatgaagaa

SEQ ID NO: 40141 - DNA, 201 bp, Bos taurus
ttcatgacaaatgatttctaaagtagaattttatactcaatcccattaacagtatgagtgttgattagcagcatattcaggaatatcagccaagaatcttrctaacaaaatccacttgggttagtttcaataaatgggaaggtattacagtccatcatttagctctcagaacttttaggtggacaagaaaactgagctcag

SEQ ID NO: 40142 - DNA, 201 bp, Bos taurus
ttcttgtttaatcacacactattgcaaaacttttaaagacagcccagaaggggcctttttttttttcattgtaaaatgagttgtaatatttcagataaaayaaggccacttgagtacacttgaggaagataatatttttaaaagttgctggcatcatttctttttcttaggaaaaaaaaacagacaataggaaaaatgttt

SEQ ID NO: 40143 - DNA, 201 bp, Bos taurus
taaagggttgtagctaaaagtgacatgcttacttctgggcctagcatttacctgctccatgcctgccccccaaccccaccaactttggtgtgggcacaaamaatactggaaatagaggtggccccaacgtgtcccctagggatctccctggtgctctagtggttaagactctatgcttccaatgcagggatgtgcgtttga

SEQ ID NO: 40144 - DNA, 201 bp, Bos taurus
attgtattaacaaaatgtcagtagatgtgcagagagtagttttgttaaacatatagttttaaaacagagactgtgtagtttacttttgatttatgtatgaygttttaagaaaagagaggaataaagaattattcttagctttgagcctgggcttcataatttaatatggataaggataatgtaaggtttgttgttgttgtt

SEQ ID NO: 40145 - DNA, 201 bp, Bos taurus
atgtatctgcatatattcttcagtttgtatgatacgtttgtttttgctgaaggtctgccctgctctggtcgtgctcattacagagaacactggctacacakgacacatcagagagactgttaaagggtcagctttcttggccttaatttctctcggtaagatacaatagtgttgctcttgtcttgtcaggaaggaaaacac

SEQ ID NO: 40146 - DNA, 201 bp, Bos taurus
tagagaatgtttttatttcaacccgaactgctaagaggtaaatttaagaaaatcttgaacaacaacaacaacaaaatgcaaatggaaaataaaggatccartgaagagtatctgacactctcactgttaaaaattgtatatgtattaatatactctagattaaaggtccatttaaaggcataccactaattaaatccatta

SEQ ID NO: 40147 - DNA, 201 bp, Bos taurus
cgccatgtaaaccatacaatgacttatttacacacacttgtgtgcatatacacaaacaactattctttcactaatacttcctgatgcgaagggaagagggmgaatactactgtgatttggttaaaatagtgcccaatgtttagaatagcattctttgaatttatctatttgtaaaaaaaaaaaaaattaagctcagtttct

SEQ ID NO: 40148 - DNA, 201 bp, Bos taurus
tccgcttttctcccctctctggaggataaaggtgggactgaaacttccaagcttctaatcaggcttcggctttctggtggccagcgcccgtctggaagccyacccatagttgcctcaatagaacaaaggatagatactcagtacgcttagtcctttggaatttagccctgtgtcgggatggggtcattagaataagagagg

SEQ ID NO: 40149 - DNA, 201 bp, Bos taurus
actggtatcagtaatatacaagaatcatgtacaacaaagctagttattactatgtttttgttcttcagtcactttcatgggttttgtttggaactctgcartaaatctcactacgtttcctgtcctgtttcaatctttgcagaggacaaggtgccgactggaagttctctcaaactcaagtgggttcagttttgtatgtac

SEQ ID NO: 40150 - DNA, 201 bp, Bos taurus
aactataaatagtatgtaagctaaggtaactctcctagaatacttaaagaataagcagaaataggagtacaagtcaggtagttatagccaggtacttttayacatttatacattcttaatatatgtgtacaataatatataatgcaatgtatataaatatatatttatatataattgaattgctgttgtatacattttcat

SEQ ID NO: 40151 - DNA, 201 bp, Bos taurus
ccttttccaggggatcctcctgacccagggatcaaacccacatctcctgctttggccagtagattctttaccactgggccacctgggaagccttatatgckaatatacatgtgctgatatatatgctaatatacatgtgctgatatatatgctgctacatgggaaaaataaaaagaccagaaacttgaggccaagattatt

SEQ ID NO: 40152 - DNA, 201 bp, Bos taurus
tattagactggagattgctgcgtgagcaataggtgattattaatattaccttctttcataagagagcttgcctttggtataaacatattttccagatgctrtaagtgaatgaagtgaactggagacctcagtgactccatatagtcaagataaaacaaagtgtgaaccagaaattgaagaattcatgtctactttgttaca

SEQ ID NO: 40153 - DNA, 201 bp, Bos taurus
agggggttgggcaccgggaaaacagaaccatgagtagaagcttggaattttcagctccagctgccattctcttggagggagtggggggaagaggggctgamtatgaagttaatactcaatcatgcctacattatgaagcctccataaaaagccaaaaatatggagcttgggagttttcaggttggcaaacacatccatgta

SEQ ID NO: 40154 - DNA, 201 bp, Bos taurus
aatccacttacattaaaagtaattattctttggtaagaacttactatactatcaccatcatcttaacttttttccaggttggctttcagttccttttttcytcttttgctatcttcttttgtgatttgatgattgcccatggtggtgtccttcgatttcttttatcttttgtgtatctactgtaagtttttgctttgtagt

SEQ ID NO: 40155 - DNA, 201 bp, Bos taurus
tatctccagtcataggagtttgtagatacagtatttatggcattagcagggtaattattttcccattccacgatggccatggttcagatgctggtttaatragattagtcaggctgcttttagtactggagaaggctctgtcgctgttgtcaaattactgtttaatgctcaacacgaagggggcctgttggggaggactgg

SEQ ID NO: 40156 - DNA, 201 bp, Bos taurus
gctggttggactcgccactcaccgcttttaagtgcttctttttttcagactttttcttttacctccacatgaccccaaacaaatcaatcaggagccctccrgttgaaaactcttccactatatgatgtgacaccagcagaatgtctttaaaaagaaccctgtttccctctgaatgtacaataactcagagcatcagacgcg

SEQ ID NO: 40157 - DNA, 201 bp, Bos taurus
gctcctagcatgatctccataccaggcaaacattccagtatctgaactctccccgttggatgcccccgttggatctggttcttaactcggcgatccagctkcctctcaggcccctcccccacctgcattctacaggcaggcaacagagacctctacttgtagttccttatctcagcttgtaattccatgccagcgccaggc

SEQ ID NO: 40158 - DNA, 201 bp, Bos taurus
tttcccactgaacaaggtgttgtagttcttgcaaggcttaaaattttcttaccccatggtatccagttggagtgttcaaagaacgactcccaacactgctkcaagggggtctgttcattacagatccagttctgaggttcaaggcaaaatatttgcaaattgctacccataatgcacaactaacccctaagctaatttttt

SEQ ID NO: 40159 - DNA, 201 bp, Bos taurus
ctaatgactcattgatcaaaaggtagggtctacaagtaagtttgaggctttccatttgctgctatgcccttagatgatgatcactttctcacattgtgatkagtcaaaaaaacatgggaaaaaaaaaattggccctagtttcccttagaaacgtatagctcttaaacatatcctcccctgcctttctacagagaagagctc

SEQ ID NO: 40160 - DNA, 201 bp, Bos taurus
ccatttctagtcagggagctgggttgacaattctgcctagtttgggtctccatccaacaggccacactgactaaagagaccactctatggcctgtctgggmaaggaaggaggctcaaagcctggcttaactattgaatgtaacctctagccctgtgctactagaagcggggccagagatgcctggcagccaaggagcatgt

SEQ ID NO: 40161 - DNA, 201 bp, Bos taurus
aagtaatattttttaacctatcaaaaattagcaaaattaaaaagctaattgcatttatgttacagcattctcatgtgtccataggcctcttcttaaaaagsaactgagcagtatccctcaagctttcttgaagaaaccacactgtaacttaaaaccttgaccaattaatccctctttaggaatctattctaaggattttgt

SEQ ID NO: 40162 - DNA, 201 bp, Bos taurus
gaagtttcctgatacaaatcaattgaattaaagtaaataaaaaataaatcataattaccaaatatgagtttgtgagctaagattatttcatcatattattytggtggctcccatttcaagtagagtaaaatgtaaacagtttgtaaaactatacaatctggtccctggctagctctctgacctaatttcttgaacacatat

SEQ ID NO: 40163 - DNA, 201 bp, Bos taurus
atataaaacaaaagagagcaaaagacatagcgtgctctttaacccattggaaagctaagaaatacgaaagctaaatgaaagataagctattgctcacagargactgacatagtagttttcatccctggagggaatggaggaaggagaaataaggagaaatcacgccaaattgctgaagttttactaataaagtgtgagctg

SEQ ID NO: 40164 - DNA, 201 bp, Bos taurus
agggacttcgtcagtgctgggagggagaagagtagtgggttaaggttattacaacacacacacacacacaaagtgaggagcagttacccaaagaaaatcayaggaggagagggagccagctgagaaatattgagtgtgacaagaattcgggagagcttctgccacatgaggtccaaacatggctacagaggaccccacaag

SEQ ID NO: 40165 - DNA, 201 bp, Bos taurus
atgactggtgttcctataaaagggggaactgtggacaccaacccacaaaaaggaaaaataatcggaaaagaaactgggagaaggccataatgggactggarcgacccatttacgagtaacactaaaggttgcaggcatcccttctagagccatccgacagagcccggccctgctgacaccttgatctcagacccccagcct

SEQ ID NO: 40166 - DNA, 201 bp, Bos taurus
gttttacttatttttgagggtgggtttgaggaatggatgaccagtgccctttaaattacaagttcctgagcagacactcagctcacatgaggccagtcccrtttggcagctcttacccattcctggtcaccaggctgccaacttgttgaccttgaaaaaatggcaccaggcctatccttctacttttgctacattctctat

SEQ ID NO: 40167 - DNA, 201 bp, Bos taurus
cctaatctctttcctctgatctgataagctaatccttgctaaggtacaaatggattgatgagttgcatatttgcattttaataaggaccttctggacacarggccttaaaccagagaaatggctataaagactggccatttctggtgctatgatgaattggtagggaagaaaatatagagcaggtaagtaattttccttca

SEQ ID NO: 40168 - DNA, 201 bp, Bos taurus
caccaggctgcccttctgagacaggtggccactcacaggccacagatgaccacgtgggcacgagtcctcaagcatctcagggcctcaggatgaccccggarcaaggtccattcacggggtagtcctctgaaggagagagacatgagtaccaggccaggcttagggcagcccagcgtgatggcactgcagccctggctggtg

SEQ ID NO: 40169 - DNA, 201 bp, Bos taurus
taacctggcttccccctgcctattgtacttgattgtttcctgtctcctctctcccactgaaccagcttgctgaggccagggaccagcctgtcctgtccccyggggtatgtgcatccttagggacactgcctgagactgtggaaggagggaacagtgggctacacgaggagggggccataaccgagtaacttaacattagga

SEQ ID NO: 40170 - DNA, 201 bp, Bos taurus
tgttggcattaaaaaccacctgggcaaataatgagcattcttatgccttggtttccacatcttccacaaaaacaaagctcagtaatatctgctttgcccgmctcacaaaacctttctaaagatctcatgaaagaatggatacaagggacttcccttgtatggtcccttggtggtccagtggttaagaatccaccttcagat

SEQ ID NO: 40171 - DNA, 201 bp, Bos taurus
gccaggcaggcaggtgggcacggcggccgtgagatgctctatccttagtcccgctgcatgtgaaagaccaaaacccatggttggccatgactggtatgtgkgtgtgactggtgggcaaaggggtagactatgaaagctgtttctctcatgcttaaattggagcaggccttacccctcagaaagcctgcgtgggtaccatca

SEQ ID NO: 40172 - DNA, 201 bp, Bos taurus
tctcagagtccccaaatcatagtatttaatttaaccttctatgactatgcagtcaatgggaaaagaaaagtgatagattttaaaggccaccttctttctcytcctggaccaaggattataagtgtagtctccagagcagcagcagcaattgcaaaatcagtggaaattggtcagaaatgtgaattctcaggcctcacccag

SEQ ID NO: 40173 - DNA, 201 bp, Bos taurus
aatcacatgggataaggaaaatgtggtagagtagaaaaggaaaaaaaaaaaaagttacaacacagaagcaagtacttcctggggaattcgctttctcaaamatgtgtttcccagagctcagaaaacactgatttctgtgttgttgtattgtgtctttgttctactcagccacttccttatcccacatgattccatttcacg

SEQ ID NO: 40174 - DNA, 201 bp, Bos taurus
cattcctgggtcctccgtgactgtcacgtgacttcagttctaaatgagatgcagagggtcagagaatcccacactttgtaagttgggagaatcttaaagaycattttcatatgaagataaagagaatggaaagcaatgagataaacacatgtcccttgcagataccaggaatgaaatgtggagaggtggctggatggtcct

SEQ ID NO: 40175 - DNA, 201 bp, Bos taurus
tctgccgtccatttcggagttctccatgcctcctctcaaggctgctcttgatggccacttctaatgctattaaaaatgttaggggatgagaacactcagtrgtttgccccgggcccctcttcaggctctgagagcaccagtatttcaccttgattgcatttgttccatgataatattggatgagtttgttaattttctatt

SEQ ID NO: 40176 - DNA, 201 bp, Bos taurus
tgagtccctgggatgaccttgagcctcagggcttggggatcacaaccgaaccaaaagcactgattcaatagcatccttatgttgccaggcctgcggtctckctccctcacttgtgaataaggagaaaatgaaacctctgctgctctattgctgcttctggagaacatgcaggttcaagagactggtgagaggcccccaggg

SEQ ID NO: 40177 - DNA, 201 bp, Bos taurus
actctggagagaagagactggttgactcaaggtcactgagatagcattcaggttcgaggaactgggtgtaaagacaggccagctcttcaggttaaagattyccaccctttgttagatgtcaatcatagaactttgcagatcaagagcagaatgagaataagttggccaattccccgatggctccgaggaagagaagacggg

SEQ ID NO: 40178 - DNA, 201 bp, Bos taurus
acagagtggcacatccttttgccctgaggggctgtgcggacagaggagcatggcagtgagggttttggtgatgccagcacatacaaaggacaatgagcaayggtgctccccaagtccacagcattccaggtccttcatgcatcctggagaggagaagggtggtgcccagtgataaagtctgaatttcctgtcagttttgta

SEQ ID NO: 40179 - DNA, 201 bp, Bos taurus
taataaattacaacactcaatataaattcactaaaaagagagtggaaatgctatttatagtttacacaccttggttgttttgtagagattttgttttagcrattctacatggatttaactgaagaactgatgcaacttcacatgctccacggactgatctggtttttatctttataggctcatgagaaccagcaccctaaa

SEQ ID NO: 40180 - DNA, 201 bp, Bos taurus
gcttataacccatattcctttctatccttggcaactctatctgccaggcattatgcctatccctatagcatatatcaacaaagatgtggtttctgctctcrgatagttagcactctatatataagacatgtgtgtttcaggaaaagtagctcctgcctatgcttcttccatggaattatcatttctttttgaaagactata

SEQ ID NO: 40181 - DNA, 201 bp, Bos taurus
tcaattattttagtgtacttccatttcttttttttcttttaaaaccagtggaggttatatttaattctttatgaaaatgtaacatatatactgtgattctrttttaatgaactttaattgatctgcttctttacctatcatttatctatctagttaacctatgtgcatttaagcatgtagagatatctagatgatagatgg

SEQ ID NO: 40182 - DNA, 201 bp, Bos taurus
gttttacacacaggaagcctaaccatcacaaaaaccctaaagggtagatttccagtctgttgttgctgtgaagacagtctggccaaaatggggttagtaamtttcctgctgtcacacagatagcaaatgagggagctgagactgactcctgatctttctggtaccaaggcccatagtctttgcactcaatgatattggggt

SEQ ID NO: 40183 - DNA, 201 bp, Bos taurus
caatgtagtatacacttgccagatcatgttttaatctataacaggataacagagcagctacatgtaatcaaaacatattttactagcagaggcaatcagcrctcaaaatcaaaacggttcttaaacgagtgttgctggtataacacagctaattgaccttttaagtatcatgtaaaccttttacctgacattctccgctct

SEQ ID NO: 40184 - DNA, 201 bp, Bos taurus
ccaccccccgccacagtggcgcccgctctggccactccaggcttctggctgctcctcagaggtgtcgttccttttcattcctccacgcctctgcagtcacrtggcctctgttcagagtgcttgccccagaactttccactcaggaaacttactcaagagctgattcagacattccttcaacttgaagcctctggatatctg

SEQ ID NO: 40185 - DNA, 201 bp, Bos taurus
agcatccagaattgtgtgaaataaatctttgttgttaataagccacccagtctgcggtattttgttaggctaccctgagatgactaagataatacctcacygtggttttgatttgcctttccttaataattaatgatggtgagcttgtctcatacgcttgttgcccattcttcacatctccatgatttttgacaattctgc

SEQ ID NO: 40186 - DNA, 201 bp, Bos taurus
aaatcttttaagtccagggtatccttccccggtaccctaaacctgctagtttattacatacaggattaaccaggaccctggcagaatcggtcaaggtcacyggggcaggtgccactaccccagaacctgacagcacgcttccaggcccatttccatcttcgctctcccacccccactctcactcccaccccccactccggg

SEQ ID NO: 40187 - DNA, 201 bp, Bos taurus
agtgactgaacaacaagaggtatttggtgaagctgtgaaggtaaacgggacctccaggagctgagtgtggaccagagaatgaacagatgcaggcctatgayagaacttccggaactgaatcctcccttttggggtggtaggaagaatgacaggaactagcaggaaatggaaagccagtggccggaggaggatgggacacag

SEQ ID NO: 40188 - DNA, 201 bp, Bos taurus
tttgtccccaccttgatgaacactgggtccctttgccttctgtttgcagtcaactaataggtacaaaaacagagggtggaaaaagatacacacatacacgrcacacacaaatgctggtgctatctcaatttacctaacttcccagaaggcctaaggctcctgtttggtaacaatctttgcagaatatctccttcttgttaa

SEQ ID NO: 40189 - DNA, 201 bp, Bos taurus
gctgagttaaccagaataattcaggccgaaaaggagtgttacaccgccactgctggcctttgcctgatgcactggcttgtctgacctcccggcccagaccrcacagtctctggtccctgctgtcctttgcctgggaggacctggctagacggggtcaggtctttcactgtccagatactaatcataacgggatgtcattgg

SEQ ID NO: 40190 - DNA, 201 bp, Bos taurus
acttactttgagaattaaacacatttttatattaatattcacaaataatcagattgccatcttaagttgcacttgtaccatatctctcccacttctcatcmataactcctgttgcataacataaaacagtggttgaatttctttcctaatgctccccgactccacacacacacatatgacgttaatacacgatgcacaggc

SEQ ID NO: 40191 - DNA, 201 bp, Bos taurus
gaaatggcaaaccactcccgtactcttgtctgggaaatcccatggctggagaagcctggtaggctacagtccgtggggtagcaaagagttggatatgaccragcgacttcagtcccagtttccgagtatcccgacaatcgagagaacacaagcagcaatgagttcagttgggttacagaggcccgattctaagtgcgtgaa

SEQ ID NO: 40192 - DNA, 201 bp, Bos taurus
agctggattatttccgctggattattcggtcgtgtcttcaccgccggctccttgtgtgcgagcttacccagaggcagaggtggacacggagcacacgcatrtaaacactgcagcccagatcagcgaacgcaggcgatggagaaaaacgatccattcctgtgtagatgtggttttaatctttactgcaaatgggcaatctga

SEQ ID NO: 40193 - DNA, 201 bp, Bos taurus
tgaacataatcagtttttatttcccatggtgatataccaacagctacattcgtttctgatagtttgcaattcagtaataatagctttgttcagtttagttyattgaagacataaaaatacttggcagccagaagctgaatttcgtggttcaagagaacaggattccaagaggacctgtacatggaacatgggtatatgcag

SEQ ID NO: 40194 - DNA, 201 bp, Bos taurus
gctcggtctctgttccatgagctttgggtggatgctaacaggctccttgctcatagatcacagaatgtcatttctgtcacatttcactgatcgagtcagayggccagcccagaagcaaagggagaattagactccaactctttttcagtctgttggactgcacgagcatttcacccacatcttgcattaaaggaaactgaa

SEQ ID NO: 40195 - DNA, 201 bp, Bos taurus
gattttaatgaatactgagattgagattttcccagcataaaatatgataaaggtaatactaaaagggaaaacaacagcctaatctcacacgtggatatagmtgcaataataaaatattaatatataaaagtcaaccatcataaaaatttcactaaatagactttattgcagcaacacatgaatgagtcccccacagaaaag

SEQ ID NO: 40196 - DNA, 201 bp, Bos taurus
agcacctgctggcccagtgctggacgagcctttagaaacggccctgcattatccgggatgggaaccaggtataaggagggcaaaagtgtggtctggaaaargtctcccttacagccggcctctgcgatgggcccttcgttcctaacctggagctgagcctctgactcctgctcaagtcatggggcggcagccatgtgggtg

SEQ ID NO: 40197 - DNA, 201 bp, Bos taurus
acgtcccaatgtcaccaagactaggatctggctaaaggtgatgagtggacggattctctggccagcccactgaccgcagctgtgaggtgtggggccagacycctgtgatgacctcccctgcttaatgtgctcacagtatccctccatgtttccggagctgtgaggtgaggggttgggcccctgtgatgcccccctcttgcg

SEQ ID NO: 40198 - DNA, 201 bp, Bos taurus
ttaaacagcactgagcatacaaaaataaatttggggataaataaagcttatttactcaataaaaggttcaccctatcattctaatcaagagaagtcccttmaaaactggacatacttcatgtgcagccttttagaagcacatactgtgtagggagagagggtttgttaggtcgagtgctccctagggcacagctctgactt

SEQ ID NO: 40199 - DNA, 201 bp, Bos taurus
gattccccatctctgagcctctgtctcagggcccttttcctggaacagatgatagcagtcccctttgacctctgataagctgactgccaagtcaagcctayagattaaatggccaagagacaaaggagagggagggagaaacacaaatggccccttaaaatcaaaatgaaaactaagtatttatatttggctttaagctta

SEQ ID NO: 40200 - DNA, 201 bp, Bos taurus
ccgcatctgtccgtggaggggcttggggccacaggtgggtctgcgcctggctcccctcgattggctaggacttagggccgagggtgtacaaatccaccctmctcggaggtgacaatgccgcctctcaggggctggaagtcacgtgctaacccaccccacacaaagcctcagccctggactccagtgctcactgacaacctg

SEQ ID NO: 40201 - DNA, 201 bp, Bos taurus
gtcgaggagcgtgggcccctggacagagagtcatggggtcaggtttacttacatgtctccccataacctcacttctgccatctgcacttgaaggactcaaytggcccctctaagcagctccacactccatggaggccaaaaacagcaccgtccaaaccacacacctgacacagtgaccccaccgggaggtcagaccttggg

SEQ ID NO: 40202 - DNA, 201 bp, Bos taurus
agagaatgccaagttttgcctcaggtcgttcctgaggcggccgccaggtggcgctgcggcgcgggaaacctgatgaatgcggggcggccgctcccaaaccrtggtcctcactgcctgccctccattaacagggaaaccggctggatctgagctcccaggtgtgaacggtgatgctgggagacagatgaaggcgatggatgg

SEQ ID NO: 40203 - DNA, 201 bp, Bos taurus
aactcattgcaaaatgcattgtggcaattgatgagttactaaacacagtgctgtgaggaagcctgagactaagatagaggggagagcccccaggaacactycaggcacttcacacacagggggctcagaactgacttaagctaagatgttccttgttcagtgacaactatcagcaacatcataaaccaggggaaaacagta

SEQ ID NO: 40204 - DNA, 201 bp, Bos taurus
tctgaccttaagagcacttctgcactaaaaactaaattcatcattaaaaccctgggactatggtaaacactttctgcatcttcagttctgctggatgcacrgcactgtcatcacctcacctgttgagaccattcatttaccgtttatcacagagatgggttttgaacttatgaaaataagttcgcttttaaatacttttta

SEQ ID NO: 40205 - DNA, 201 bp, Bos taurus
catgtgagagagattaaagttgaaagcaataccatcacacaaataccatcctaccctcaagggagaaggctggtcaaaggccgagctccctgtggtcaacrcaacagaccaaagtcacgctctgtctctgccctttgctcatgccctctcctaacatctgcaggctggggcgagagtgcatacgaaggcccatgtatgcca

SEQ ID NO: 40206 - DNA, 201 bp, Bos taurus
agaaaagccctgtcttgatcacactctcatgctttaaagcgtcctactctgaccttcctctggccatgcccttccccatgggaataatagcccaggcccaygggacacttccacctggagcctggttcctccttcgagacatgcttcaagcacctcaggtcacagaatgtccttccaagtgtcctgcggctgcttcctggg

SEQ ID NO: 40207 - DNA, 201 bp, Bos taurus
tccagatgccctgtggccatctcatgtgcatatgagcacattaaggattgtttcttcctcttcttaaagaaatatgtttttccctctgactccatctagarccaaggcccaggcagtcatgtaactgtccttgctcatccaggagtatattttacttgtaggcaggcatgtctaacgtgacccccactctgctttttcccc

SEQ ID NO: 40208 - DNA, 201 bp, Bos taurus
ccctggcacctcccctccagtgtccactccttctgttcctaacttatcctgtcttgacttttgttcccataattccctctctggtgagtgcccacaaggakaggaggcccttccttactgattcatggaaccaaaaagatccttcaaggacatccaatccatgatcatggttttgtagaggggaaaagggagtcacagaga

SEQ ID NO: 40209 - DNA, 201 bp, Bos taurus
gggagagtaccaagtggccagtgaggatggagagaggcaggtgaagggctgggacatcggccagagaggacaaggcttatgggtccaggagagccatgatrggatctggggagggccatcaccgagaggggatgagaaggctccagacagagacagtgaggagcaggagacattggttctgggaatgttgctctccttgga

SEQ ID NO: 40210 - DNA, 201 bp, Bos taurus
tccacagaattcctaatgtcctgtatctggagttaacaagttcccaggtggtactgacgttgctggtcctggggccatacctcgagactattatattagcmcatgtaattttcatatggcctttttaggataatgttacattataagtacatctctgtatcattagtcttcataatttttgatgactgcataatgtttaat

SEQ ID NO: 40211 - DNA, 201 bp, Bos taurus
ttttttatcctttatggccacatcatatgggcataccatgatgttctatttatggttgatgccagtgtttgtgattaatatggacatatttaagtggtttmgcctgcaatactggttgcttttttaggaaacagaagccactgtaaatctcaatacttaaaatttaaggaacttgaaaggttgatgtgtcatattgaaaga

SEQ ID NO: 40212 - DNA, 201 bp, Bos taurus
ggcccgtgggcagcgaccaggccccttgcctttcctgggcctgtcccaggatgccaggctctgtcctctgcctcccaggccctggcctttccttccccacygctgactctcctcttggcagccttcgcaaggctctgccaggcacttttaagaatccttcaggccaagcatccctggttccaccagtgtcgttgcttccaa

SEQ ID NO: 40213 - DNA, 201 bp, Bos taurus
ttcaggccaattctaacatcagatggaattctcagatggcctttgaggtcccttccagccccctggatcctttctgtggtggtttggaggggtggtgctcrttgtgagtctggtgcccaaaggccagattcagaaaatagtccctgtaagccttgctcttgctcttctgcgtcctgagcacctatttgcagctgctattgg

SEQ ID NO: 40214 - DNA, 201 bp, Bos taurus
cttgcagactcatacctaaaccctgtcggtgagtggaaagtaacaagctgcgtctggtggcaggctttaagtcagaatccaacacttactttagtccatgygtggcccacgcattattttatttaccacttccacccatgcctctttctcactctgcacacttttctcagtcacagtttcggcaagcccacaagctaaccc

SEQ ID NO: 40215 - DNA, 201 bp, Bos taurus
actgtacatgcttggccaatgcacagccagtgatgacttcgccatccacttctgcttccaggctgttccaaaggctggagaaaacaagtcatgctgacagrggccccccactcctggacaaggccatgtccctctctgttgcacactttcccgaaacactcttcccactcctgttcctggcagaaggtctggcctctcctc

SEQ ID NO: 40216 - DNA, 201 bp, Bos taurus
gagccctgggtgatccatgacatggcaggtaaaaaaaatcaacttttaaactgatacaggagctacttagctctatcctgatctctcaccctcggcctatytcctccaaaagccgtgctgtgactggtgttgatggagtctcccacgcacacctgttgctttgctgggcctcatttgccaacttgaatagcatttggtctc

SEQ ID NO: 40217 - DNA, 201 bp, Bos taurus
agagtatgtttagttttgtaagaaaccaacaaactgtcttctgaagcggccgtaccattctgcattcccaccatcagtgagtgagagttcccatggcttcrcatcttcatcagtatgtggtgctggtagtgttttggattttcaccattctgataggtgtgcagtgatatcttgttttaatgtgctactccttgatgacgt

SEQ ID NO: 40218 - DNA, 201 bp, Bos taurus
aatcctctagatgggaaataaagcatgtaaacagcgcacctagaagtcccaggggctctggcaagttcaaggtggtcgtgtaagtcctcccagagaagagmtgatgtgcagtgagcgaaaggcttgggaacagtaatcacaacgtccagcctctgaagcacatagagtgctcagacagtctgtggtctgtcatttcatcca

SEQ ID NO: 40219 - DNA, 201 bp, Bos taurus
ctccaaggactgtgcttgcccgagttcaagaccaaaggaaaacctaggagtcagaaacagaaataatgatgtaatggatgagggggcaggaacaggaatayttactgtcaaaagcaaggccctggagtgacaccccaaggtgggcaagatatggcagcaatcttcattcctggggaatggtggggttggcgggtagggatg

SEQ ID NO: 40220 - DNA, 201 bp, Bos taurus
tactctgaatctgagctggcctttggacttaactttgatcagtagaacgtggaagtgataagtgcaagttctggaacctaggtcacaataggccttatgayttctgccttttccttcttggaacacttgccttaggactgcagtagaatgaaaaagcccaggatgagagaccatgcatggaatgaaaggccctgacagctc

SEQ ID NO: 40221 - DNA, 201 bp, Bos taurus
atctcagtaccccagacccctaggctggggccaggggttcagttgtgcaaatcctgaccccagaagggcaaatgggacaggaccgcaggcaattctgcgcrgtggcgctgggggaaggccgccggcaggaaagacaccgagctgccttctcaacactgtgacacagattaaggggttcatggtggaattgggggaatgaaa

SEQ ID NO: 40222 - DNA, 201 bp, Bos taurus
atcctacaggcatgtgccaatggccctcttgtgcctgatacagagttgggctcctgggtggattcaagagcaaagagatggtctccgccttgagtaactgmaacgtgatgcaaaacaggccacagagctgtgctgtggggacacacgcacacctcgggttcctggcctccagcccctctgccgggacacctgctccctcac

SEQ ID NO: 40223 - DNA, 201 bp, Bos taurus
gcgtgaagctcttgtagcagaactcgcactggtagggcctcacgcccgtgtggatgcgcatgtggttcttgaggtcgtagttatgcacgaacttggcgttrcagtggatgcacagatagggccgctcccccgtgtgcttcctcatgtggattttcagcttgtcctgcctgcaacacagagccggagtcagtccctgcctgc

SEQ ID NO: 40224 - DNA, 201 bp, Bos taurus
tcttccgaacaagaccctaatgatcccctgtgtctcagcctgtgcggtcccctctgggcaggaagactctgtccccttgtccactgtggatcctggagggmggccagtggtggtaacttagggtccactcggtggtctctgtttagccactgggcagagtccagtgctcagtgttcacactcaggccagagcctccattca

SEQ ID NO: 40225 - DNA, 201 bp, Bos taurus
ggggacttggactaattgtccaggttagtctggacagagaccataggtgtccatctcatgcagaatggatggagagaccagaggtggggccaggttgggaraggctccctattgtcatcgagattaatttgtgtgacctctgacggcagaaaccagaccggtgctcacctgtttcaggtgagggctcagaagagggaggcc

SEQ ID NO: 40226 - DNA, 201 bp, Bos taurus
aaaattatttgtgtctctcccaggcctggcccatccaaatctcctaggtgtggccttccattctgtatctggctcatggagaccttagaggccacatcctraagatggcagctccatcacatgacagacgcctgggtctctgaaggaccacgtggagcagaggcccctgtctgactcccactggacatgaacatgagcaag

SEQ ID NO: 40227 - DNA, 201 bp, Bos taurus
ctgtgtctctcatgtcaccctgtgattagttagactgtgagaaacaaaggcccgaaatgtgatgacaaacactcatgagtctactcactcatttaaaaacytgttgtgaaggtgggcagtctgaggccagtgtggcagctccatgaaatcgtccactctttcttctccagcatcctcaccacaaaacttcatcctcaaggt

SEQ ID NO: 40228 - DNA, 201 bp, Bos taurus
tcttttattccgctcaggagcctgccgcttgggcagggctcagtaggtacaactcacatctactgcacgtggtattggctgggatagctctaccaaggccrgaagatccacttccaagacggcttgtttctgaggctggcgagttgtgttggcttcacctccatgtgggcttctccacggggcctcctgggcttcttcgaa

SEQ ID NO: 40229 - DNA, 201 bp, Bos taurus
cccagctcccatcctgggaaggagttcgccctggcaggcccaggtgaggcgctgcggcaggtgtcctgatcggcagtaataactgcctgtcactgagagcrgggctgctttgtcacctttggggccctcctccccacccccacctgctgaacccccagagacaggcatgagcacttgagcaccaggggaggaggtagaaca

SEQ ID NO: 40230 - DNA, 201 bp, Bos taurus
ttactcccttaaagcccagcccactaataccatcaccctgggattagggcacagtatgtgcagctgaggtcagaggatacgttcagtcgtaacagttcacrttctccagggggaaggcacacttgctaagcactggggccaccagcagttccacctcaatccactttcaggaactgaatgaagtgattgagaagctggatc

SEQ ID NO: 40231 - DNA, 201 bp, Bos taurus
ggcacttagattgctagcaattttcaattatcataaacattgctaccaactgtctttacacatatatctctctacatacatttcttaaacttgtccaatcrtctccttaatataaattctagaaatggaattgctagatcaatgacatttctgttctggtgaatactgcaaattgcattccagaaagatctaaccaattac

SEQ ID NO: 40232 - DNA, 201 bp, Bos taurus
ggctgagcgactgaactgaactgaacgacattttacatttgtgctaaagattagggacaatagaacatcagagaaaaaagcacatcactgggccacggaamactcactgctctgatatggcttaattattcaactcagagagctgctatttccttttctttatgtctgaatatcaactgtggcctcataatcatcaggttc

SEQ ID NO: 40233 - DNA, 201 bp, Bos taurus
ctgcctgaaaccacaagatggtttgtagtgatggttttaggttttagatgaagaagacaagagatgttcatgcaggactcagaccgcagaagctggccatyggggcttcaccactcctaaccaggataacttttgcattattacttgtattctagtgatctttaggagtacttaggtctcacccctcaccctctatttcag

SEQ ID NO: 40234 - DNA, 201 bp, Bos taurus
agccttaatgatttgtgctctgaccctctctctgactgctcttccttccctcaccctactgtgcagcctgtgatcatttcaaatgctcttgctgtttcctyggccttccctgtactcttccctccccttgagccacttttcgtatccacacacagcgccatttttgctgccccatgaattctttcttgatcccatccccca

SEQ ID NO: 40235 - DNA, 201 bp, Bos taurus
gggttgactgtttccaaatccagcatctgatcgctttaggaggccaagggctggcaggccaggggagtaaaattctttccattgcattctcatctggcctycttggagcctgggtttcttgaaaccctttcggggtccaggcagtggctctgggacctgcttgagtcaaatgtgcaccttgtgaaggccctttaggacatg

SEQ ID NO: 40236 - DNA, 201 bp, Bos taurus
ttcagcagtcatggggcgcttctggctccttctaccagcagcgacttccttccgacacacaggcttccttcccctggtcaggggccttcctgcatcaggakccctgaatgaccaccacctcctcccgccgactcctccccttctcgggacccgggagagaggggtttctaacacctgcagcccaaggcctgacccctccca

SEQ ID NO: 40237 - DNA, 201 bp, Bos taurus
tgaggttgttggttcacagactgcacttggaatagtgaggtctggcatggatggttctgaagtgcctggaggctggctgcccttcttctataggacacttkcaggcctcctgatcatcactcttccttagctgctccatctttctgtgtccggccttctgattttttgacatttcttatcataataaggttttctctgatt

SEQ ID NO: 40238 - DNA, 201 bp, Bos taurus
ggccaattcatcttactgttgctgtgtctacacagactctttttttttgtctcaatgtggaagaactttagttgactgacaggcgctagccattcacagartgtctaattagaactctctgtgggccatgtctaatgaaggctatggtttttgcagtagtcatgtatggatgttagagttggaccataaacaaagctgagc

SEQ ID NO: 40239 - DNA, 201 bp, Bos taurus
tgattcatcttcataaaatgtaccttttctcatgttccaattcagctctagactgcagtgatctttaataaaacagcccagaagccggcctaggtctctgycctccagatctaggcaaaattaatcccaaactttgtacattataagcccccaatgatgcctatggcctgtgagctgatgcacaggatggaactgtcaaat

SEQ ID NO: 40240 - DNA, 201 bp, Bos taurus
ttcagtctttttcatgagcctcgaacggaagcctgtgaagaaaagcctgaggatgacaatgcatgttgtgtatgtagctccccagcatcagggtttctacrccctcatattgttccaaattcagcatctagcaattcattaaaaaaaatttagccaaattccttgtatccactgtgtagtggccccatcgtcctcttatgc

SEQ ID NO: 40241 - DNA, 201 bp, Bos taurus
ctcccaaacctccaaacccgaagaggttttgctgaaccaaattgaataggaatgtctttcttgtgtcttttccttgcaccttgattcctgtaatctgaggsgctatggaaaacactgagactggctctccaaattaagtattcgatgagttcttgaaccagtccataacaataggagctttttgaagggtgcagctttacc

SEQ ID NO: 40242 - DNA, 201 bp, Bos taurus
tgtatatcacatcttctttctttattcatctgttgatggcaacttgggttgttctgtaccttggcaattgtaaacaatgccactatgaatggtggagtgcrtgtatctttttcaactggtgcttttgtttccttgtctcttctccaccagggggggaattgctgagtcatagtgtagttctagttttggtgctttgggaaa

SEQ ID NO: 40243 - DNA, 201 bp, Bos taurus
gctacgaagctccccagggcctcaaactcaatttctcccccagcttcttcctaaaactaaagtaaacacactggagcactgtttaccagaagcggccaacratgccccaaggagcagtatccctgaacttgtaatgctgtcagcagagaaaatgctgatgcgatatttgacacccagagttcaagggagagagcaactggg

SEQ ID NO: 40244 - DNA, 201 bp, Bos taurus
ctgatctcctgacagtgacatcataggcttttctgcccagagtcatttataattagggctccaggtaaaaaattaacagcaggaacagatgggcccataargggcaaagagtcttttcacatggaaatttcatcagtactttaagactgaagaaaactgtagagcacaggaaggctcggccccaaaataattcttctccat

SEQ ID NO: 40245 - DNA, 201 bp, Bos taurus
atgaaagaaaaagttttaaatgtatccaaactcagataatttgtcttaaggaataaggtaaaatgaagagtctcagtactgttggcttaaaatcttctgartctcaataattcttgtgctcaaattaaatgaatggtttatattaggaaggggaaggtttacagtgggtagtgaagcttgtcaaaagtcttgaagatgtgg

SEQ ID NO: 40246 - DNA, 201 bp, Bos taurus
ggaataaaaaatattaaaaattttccattaaaaaagtagggatagaaagagtctttaaacacaaaagataagtcataagggaaaggataaaaatactgctytgaaatttagtgttttatatccccaaaatactagaagtttaagatatttataatacatacaagaaagaaaaccgtatgtccctgtaacttatttatttta

SEQ ID NO: 40247 - DNA, 201 bp, Bos taurus
gtcctgtctctggggccgaagcagactgggtggcacctcgcttggcttacaaagagcaaaggtttgttcagctgagtagaacaaggagaagcgttatggayggttatctgggaggccatttccaaatggagtgatgatgcctgaaacaggaaccaggtcctggtttgggtcctgttagtgaggacaggaggctgagccaaa

SEQ ID NO: 40248 - DNA, 201 bp, Bos taurus
gcctctagggagcattaaatgaataaggtctgatttgcttctaaaaggcacacaatagtctagaacttaatatattatatttctctgtaaacagatttatrttgcaaaggactacagagggccttaagccaaaggaacagaaagcatttagctgtcgtgaggtatgacctcacaccagtccaaatggccatcatcaaaaag

SEQ ID NO: 40249 - DNA, 201 bp, Bos taurus
tcaagcttcgctctggggaagagaccctcaccccaagggctccttctcctgacatctatcaggcatcttaagccattaacctccagcacctctttgaaagygtgtttttctacaaaaactttggcttgaggatagagagagagagaattatatttgctcgaatacaatgctttaaaaataaatacagttggggccctgttt

SEQ ID NO: 40250 - DNA, 201 bp, Bos taurus
agtaagtttatattccccggtctgcagattaggatttgaacgtatcgcttgggggagacccagtttaacccactctgccctcttttttcaggttttcactktctggccaagctcattgctaccctatggtagacatttcttcttcactttctattttatttatttgggccacactgggtcttcattgctttgtgaggcttt

SEQ ID NO: 40251 - DNA, 201 bp, Bos taurus
ctctgaatgaaaaagaagacaaagcattcaaatgagactgaattcaaatgcagtacttcattcagggcggccagagactgaggcctatttgggatccactygtttttttttttttttttttttgtgaaatcacttgacaactcagtcacatgaccctgcattttctgtggataaatatcctggccttcactgtgaacacta

SEQ ID NO: 40252 - DNA, 201 bp, Bos taurus
ttcaagtttctcatttgcaatgccatgctcatccttcctctctcccttccctttgttatttggccttaaaaaaaaaaaaaaaaaggacaagctccatatcrctgtccaagtgctgaactctcaccagtttaaaaggcagtatttttataggggaatcgtgaggctgtcacattgatttcaggaagcctcggttccattctg

SEQ ID NO: 40253 - DNA, 201 bp, Bos taurus
cccactgtcttttttttttaacccataccataagcctttgaggtcggtactgttattagttcataatgcagatgagaaaacttaggcccagagagcttaastggttccttgactgataaggaaggtgactaatatggatgtgagcagtgtgaccctgaggcgtggggatcagttacttagctatgtctgtgttctgggcca

SEQ ID NO: 40254 - DNA, 201 bp, Bos taurus
catttacaaatcctgcaattgtaacagaatttttgtttctcagagacatgtagccattgatgttgctaacttttataatggttcttgaattttagtgaatygctcattttaaaatgccaattatacttttctctagagtcatacatattccgttttcctctctatatgctcacctttgaaaggcagttaacttcttggaaa

SEQ ID NO: 40255 - DNA, 201 bp, Bos taurus
cattagagaagctatgactacccctaaaagcttcacatttcttgcatgcttccagaatgaagcttccagaaggatcctgatgtgggccacggtgctcagcygtgcccatcccaacacaaagcatgtctggaggtgtcctcaggtgctcagtgcagaaatgagtgtgggcaaagacgaactcggtcatggccgagaacaggg

SEQ ID NO: 40256 - DNA, 201 bp, Bos taurus
ttctttaaattggagtctctacacaaaacgttttttaaattagccttcgttccttcatttccaaagtctaacacacattaccactgttttacactagcatrttacatctgatttttaatttggaataatgtgtctttcaaccccatttattttatatgatttgttaagaacatcagtctcatcaaactaattatcgaaggc

SEQ ID NO: 40257 - DNA, 201 bp, Bos taurus
tagtcagggaactgagatctcacatgcttcgtggccaaaaaatcaaaacatagagcagaagcaatattataataaattcaataaagacttaaaaagaaaamtatgaacaccccacttacaaccgaggtttctagcagtcataatggctgctactagctatgcattattgacaagaaaattgacaagaaaattcatggatct

SEQ ID NO: 40258 - DNA, 201 bp, Bos taurus
gttaatatacaatatttgtttttctctttttgacttaacttcagtctgtgtaacaggctcctggttcatccacctcagtttaactcactcacattaattcmttttcgtggctactagtagagttttaaatcaattcatttctattgtgtttttgatttatatgcttgtgaagaagaaagattgaattccctagtttcagat

SEQ ID NO: 40259 - DNA, 201 bp, Bos taurus
gtatgattttaaaagaaacattcctacatcacagcttctagcaggctcccccaagtatgttctcattgctggggacaaaagacaggacaagggggaacacrcctgggcccctggggcctggatttggaccatcacattgtgacttccgatgtcgtcagtttaccaaagcgagttacaagttcggcccaaacccaaggtggg

SEQ ID NO: 40260 - DNA, 201 bp, Bos taurus
tgagtccatatcagctttgattacctctcaagcttcctgactatctccccaatctgtctactgtcccatccagcttggccaccaccttgacattaagcttyctaaaacagtaatgttctgattttccttgtccaactacaaagcctccaaggcctctaccaggaaatgctgtggactaatggacttcggagttgataacaa

SEQ ID NO: 40261 - DNA, 201 bp, Bos taurus
tgcacttccactgtagaaggcaaggactggatccttggtcagggaactaagatcccgcatgctgcatgttgcagacaaaaatagaaaagaaaatgaaattwaaaaaaatttttcaataatcagtggctgtgagctttaagagatgtcatgcaagctctgaagaggaagtctgcagaaaaggtacaatactttccaaatttg

SEQ ID NO: 40262 - DNA, 201 bp, Bos taurus
ggccttttgagttggaattccagagctcttggagcattgtctcaaaggagtgggtggtttcttggtgagcgctttcctttggcctagtgggttagagaatycttgatgcagagagcacagttagagaggagtcggagcagacccagtaaagcctgggcccgagactaattctagcacttggggcttcttaactcagcattc

SEQ ID NO: 40263 - DNA, 201 bp, Bos taurus
agccttgcctgagaagaccttgactccgaggaggggcctttagcttagccagactggtgggaagacagtgactcatgaaattggcaagtgatgaaaagagkgtggtaggcctaaaaaaaaaaaatgaggttacttgactcttcatttcaccaatgtttagcctccttctgcacatgcccctgctttgactcaatcaaaatc

SEQ ID NO: 40264 - DNA, 201 bp, Bos taurus
taaaatgctaagggaaaactaaggcagggtaagagatttatgaattgatggaaagatgttttattggatatactggccaaggaaatcctctcttaaaggaygactttgaagcagggaccagaataaggagaggaataagccgcatggacatctggtgaaagacttttggaggcagagaagatagtgggtcagaggccttga

SEQ ID NO: 40265 - DNA, 201 bp, Bos taurus
actggaaaaaagaagagccttttttttgctttgcctctcaatctggtccctactggtcaaatatcgctcatgtacggacgttgtcaaagcctttggagatmgtcattattatcagtcatgatgttaatgggctgtcatcattggctgaagttgacttactctagatgctttgtttacttagctaacaaaaaggcagcttgg

SEQ ID NO: 40266 - DNA, 201 bp, Bos taurus
ggacattagcggtggccaaagtgtccccaagcacctcccttgttggcacagcaaagaacccccagtaaggagcagaaaggtggagcttcaggagctactcrgttgtcctccacttctatggccatttgcccatacagcgttgagcattcggctttagttctctccttgaatgcagggacactgggtccagactgcctggct

SEQ ID NO: 40267 - DNA, 201 bp, Bos taurus
ttagggcatgacggtcttgatgaagcgtttgaacatctccgtgtcccacaggaagaaagaacaatttccaggctgtgctgggacagaggatggggagcgtmtgaccatttttctgaaggaaacaattctgttgattggaacaggattttgcaaatgactacttcgtttttcagaggttgcagcttttaaaaatctcctaac

SEQ ID NO: 40268 - DNA, 201 bp, Bos taurus
aataggaaaagaatctcgacaagaataggaaaagaatctcccacagaaggatattgcacttcaggacttggatcaccccaaggctgtcctttcaaagcatyctcttcctttaccagtggtctctctgctttgcttggcaactcaattctctcctcgttaacaagctacgtgatgaaggctggaggtacctctgtttatttg

SEQ ID NO: 40269 - DNA, 201 bp, Bos taurus
cccttcacggttccactgctttcttccttctcctgaaagctaaggagctgaatcgcacagctgagaccagagagtgagcccagggcttctgcccaccccayggccttacagaagcagagcaagttggcaggagccggtgtgacctcattggatgcaagctgcaaggctccggccccgtgatggcagccctgtggttacctc

SEQ ID NO: 40270 - DNA, 201 bp, Bos taurus
agaaaaaaatttttaagacaataaaattttaaataacagctaagatagagacagcgtgatcaaggcagaactacactaccccacttcctctgtgacaacaytgcaggaaaatacagggaaacacaacaggtttacactgggagtgagggctagacataaaaggaatgtctcatttaggtgggtagaaagtatgaaggcagc

SEQ ID NO: 40271 - DNA, 201 bp, Bos taurus
gctgtggtctgaacctctgtcccctggagtggaagtgtgagggcctgacgatggcttgccaggagtccccggcgttctttcttgatctcagcacgttgtgytagttgctctgagcttatttagttgagagaaatcttcggtgatacatcttaaaaatgaatgttgtcaccatggagaagtgaactccttccagattccctt

SEQ ID NO: 40272 - DNA, 201 bp, Bos taurus
gatcccgtgacaccctggattctcggtgagtctgctgagtactgggaaagagaaaaaacgaaggaatcgacagctcgtttcgcgggactggtgctccggcrgaaaatggctgctttttacagacgaacgttggcaatagacttgatgatggggcgtgctgaaccccagggaagtgaaatgtagccctcctcaaaagagatt

SEQ ID NO: 40273 - DNA, 201 bp, Bos taurus
caccgtgatggccactctccagaaactctctagaactgagagacacgtaaatgaggtaagcagacacccatcctgtgctcactgggggctgatttggcgckcgtgagggggcctcagcccagaagaatgaatggaggagatagaatcagaaggattatgctgagcagcgatccaaacggaaagaaaggtgcaggaaaggtg

SEQ ID NO: 40274 - DNA, 201 bp, Bos taurus
cccctggtaggaaagttttctctgagacatctaccttgatggggaaacagaaagaacttcaaagctgttcctcagggagacttccactctgccaacctttmccgtcttggcccagtggttgacttttccagaaggaacaccaaggtgggtgacggaaagaaagagaaagttggggcagtggtgcaggtgagatcagaacta

SEQ ID NO: 40275 - DNA, 201 bp, Bos taurus
ctgttgagcatgttacgctcttctgctctctgcccgacagacggtacagggctgggaggacagaagggcccggagagctggccctttgaggacgggagccygtgtcgggcagagatagaagactgaagacagccagcaggacacgagcaggagctcagttacgaggaagagactctgccaacgagggagtttcaggaagga

SEQ ID NO: 40276 - DNA, 201 bp, Bos taurus
agctccagccaacagtcaccaagggaacgtgtcagtgtgataaccaagcaagggaataacaatggcgtggccggacaggcctttcttttttttcctctgtygctgtctcacgaggcagcttctagcattttccagtacaactgtcttttggttcatttggaagttgtggccgacactggaatagtggtcagaaaacctgct

SEQ ID NO: 40277 - DNA, 201 bp, Bos taurus
ccagctaaaggcagaccgttccgcactgctacgtgcctggagctcaccacgctttaatcacatgactgccagatattcgatccagaaggaccttggccgcrtgagtccccagttcttgccctcgcttcctccctgggtgcccagtgcagttgacctcacttgttgctctcaggggcggccctgcagagacccaggatgatg

SEQ ID NO: 40278 - DNA, 201 bp, Bos taurus
gggtctgtcatgaagggctcttaccatgttgagctgtgttccctggacacccactttggcaagagtttctttttaatcatgaaggataccgaattttatcmaatgctttttctgcatctatgatcgcgtgtcttttgtctgacactgactcgtttgcatatgttgagccatgcttgtgaccctggaatgaccccaacttga

SEQ ID NO: 40279 - DNA, 201 bp, Bos taurus
cactccagcatgcgcgtgggccaacagatacttgtcagtataataacctcagtgggtaaactctgcgcctccgcgtcgtgctccacggagcagggactacrctcccacggccctgattttccaatttgcttttccctgatgcaccaccgtctttacttgttgtatcataggactgagtttttcgcgatctgctgttctgtt

SEQ ID NO: 40280 - DNA, 201 bp, Bos taurus
aagtccgctaaggcgctctttagcgctgaccctgacgagtgtcgtgttcttcagacaaccccatctgcacttcacgctgttctcacttgtctttgttgttmggtcgctaagtcgcgtctgactcttagcgaccccagacttcagcaagccaggctttcctgtccttcacatctcccggagtctgctcaaactcgtgtgcct

SEQ ID NO: 40281 - DNA, 201 bp, Bos taurus
attcctcagtagagtgcattggtctactacataaagtgatagcctagctctaaaatgaaataaaatgaagaaatcttatctgtaaagccttctttttttgygttttgtttttaaactttatatcctcctttaaatgtctccccctcctcctcttttttttttttaacagcaaaggacaaggttgctcttttgataggaaat

SEQ ID NO: 40282 - DNA, 201 bp, Bos taurus
tgagtgtgactcctttctctggcctttctgagcctgaccatttcagagaacgttgctgaatagcttggttctgagcaccaggaatgagaacgtgctgactyctaacagtgggtggccctaggtaaatcttaattttcttttgtttacagggtacttggtagtaggtggctaggtaacagcacagatggagactctttccgt

SEQ ID NO: 40283 - DNA, 201 bp, Bos taurus
tggttagttgctgcgtagggattaccgaagaacccagtccctgaggatctctcctttcaggaacgcacagttccgctcactgcaaggatttctctgtcctkcgtggggccatcgcacctatcagtcctctgcgtcctgcgtggggccatcgtaccgtatcggtcctctgcctgctttcaggatcatcctgtccttcttagt

SEQ ID NO: 40284 - DNA, 201 bp, Bos taurus
aactgatggatggttccatacgagcctgtagcccccctcaagaggctgacttgatgcaaagactttcaaggcctgggaaatgactctcccccatggccatygtttcctcaaagttgtctcctctcgcagctgaaaattccaattccttcaacgcttcctcaatgacagccagctgtttcaagatttctcggccagcacccc

SEQ ID NO: 40285 - DNA, 201 bp, Bos taurus
ctggaatctgcacccgatctgggaggcttctcctcctccttcagggtgcagctcaactgagaaactactgctgacctttacctccctcctggcagagttayaggcttctggcctctgggtccctaatggtatccgtgttgtagcatttatcacgcagcatggtgttacctacggttgcctccatgagacacgctctttgca

SEQ ID NO: 40286 - DNA, 201 bp, Bos taurus
attattcatacatcttccagccataccttcgcgcagtaatgttacgtaacggcactccatctggattggactggatctgagagcccgctcctggcccagtrcctcctctactggaggcagatttctcccaagtggtctaagagtggtccctctcattagcatcaaccagaaccttactaaaaaagtaaatcttatggcttc

SEQ ID NO: 40287 - DNA, 201 bp, Bos taurus
tcaacggagtcaaatcccagctgtggacaagtccccggggtgctcagccagctgtgctctgtcttctaggaacagttaaagtggcggacatgacggggccyggagcataaagaggcctcgggtccgcgggacaggagaaagtgagctgcagtaacacccgcctcccatcctcctttcctggagatgactaatgcgagctct

SEQ ID NO: 40288 - DNA, 201 bp, Bos taurus
tgatgtaaggagacctgttcttttaaaaaagaacacagacagaacagtagaggctgcttcccctgatccacctcggcctggataacacactaactggatgyggagggaccaagcctagctgcccacagagcagaagccgctttacttctgctgcaaccctctcccaagtggcccctgcgtccccaggggcctgcatgcgaa

SEQ ID NO: 40289 - DNA, 201 bp, Bos taurus
ataaccaatcagcatagacgataaaatcagaatcgcaccgtttgggccctaggcttcctgtgccgggcgcgctcctggtgcccagtgacgctcctgccctyggaatctgggagctggccacctccttatctcctgttcctttgcttttgtcaggagccagcttgagtgggttatatgcgagcaaaggaaatgagaattttg

SEQ ID NO: 40290 - DNA, 201 bp, Bos taurus
ttcacatctctgcaaatggcactgtttcgttcccttttacggccgagtgatattcccctgtgtgtgtggagcacttcctctttatccattccactgttgakggacatttaggttgcggccacatcctagctattgtaaatagcgctgccatgaacactgaggtgcatgcatcctttcgaattccagtttctcaggatatat

SEQ ID NO: 40291 - DNA, 201 bp, Bos taurus
caaagcatcttgacacaggaaatgactggcttgttcgaggcccagcaggcaggctgacgcggttggaacgtgatgagcaaaagagagtggtaggagatgargtctaagaggtggccgaggccagggcacgggagggccttcgggttttccttttggtgtgatgggaacctgttggggcacgggcagaggagaatgatgctg

SEQ ID NO: 40292 - DNA, 201 bp, Bos taurus
aagagctaagagcccacatgactcatggccacgaaaccaaaacataaaacagaattaatattgtaacaaatgctacaaaggctttaaaaatggttcacatmatttaaaaagtatatggccttatacgtgtaaatgtacacctggctgaagatatactgtgatgggatatagatgcatattataaccaagtaaagggaactt

SEQ ID NO: 40293 - DNA, 201 bp, Bos taurus
tattaattaaaaaacaggccacatttgcaattacaaacatagaaaaatatataaataacaaattttgaaagatttaaagaagtcagtgggttttttaagaragagaacatggaaatgtggcctccttaaaattaactgatataaaattaagaagcaagcaaatgcctagttactttcaatttttttttcttatttgaaatt

SEQ ID NO: 40294 - DNA, 201 bp, Bos taurus
cagtcgttccgagttcaccttttaaccaactctcaaagcaacacaatttttctattcattttctgaccagaaatcaagttattttacagagaaacaactgsttttctggcagaggattcctttgactattctttccaaaatttaaacaaacccagattccaatttgtgtcttaatctccttacctcaggatcatcaggccc

SEQ ID NO: 40295 - DNA, 201 bp, Bos taurus
aaacaacatcatttaaaatgatgtcaaagtcagaatgaagaaaatagattttgatgatagatgtttcccaacttataaatgttaaacctaatttatccttkgattcactctgtaattttgaactggtttccttgtttttggtttcctctatttttttctaaaacaaaaaatgctatttattaactagcactttattaactt

SEQ ID NO: 40296 - DNA, 201 bp, Bos taurus
aagtgggtgtgggttggggcagccgaaaaatgacagctgggtggcagctgacgttggccgtcggagaggcaacaaagaacaagaaacagaccgggccgccrgcgcctctcacaacccacgcgactcaggcagtctgtcttgaaatatgtaaggacgctgcaaagaaaagaacaattccaactgtaagaacacccctgcgga

SEQ ID NO: 40297 - DNA, 201 bp, Bos taurus
aatccgcctcccccaggaacctcactttcgaggatggtgtggagttcattttagcagccctcagtgtattcatctgggcctcctttcttaaggtttgtaayatcccttcctttggattaaatttttctttattccataaagaatttttctatcaccagtataaaataccaggctggaggcaagggcccatacaggctgagg

SEQ ID NO: 40298 - DNA, 201 bp, Bos taurus
ctgggttgcagcgctatctaaatttacatcagaactgaaatctgtccttctttaaagcagattcacgtggtatgggagcatcatgggacactgagggcctytggttcaagttcgctgattccctgctgacaaattgaagttttcatctccagataccatcctacaaggcccaccaccctctcctgcttccatccgaaatcc

SEQ ID NO: 40299 - DNA, 201 bp, Bos taurus
gcggctaccattttccattcccacggatggcaggtgagggttccgctagctccacaccgacacattgccaacttttccagttttagctcttctagtgggcrtgcagtgttagcccaatgtagttttaatttgcatttccttaataattaatggtattgaacatctttgtgtgtatctatttgccacctgtacttcttctat

SEQ ID NO: 40300 - DNA, 201 bp, Bos taurus
tgactcagggaggtgcctggtgttctggctcctaagggagataggcagcagggcggacggccagccctgctccggcctccagccagagacaccctgggccygccccggcacactgttacctcacaggagctgaaacggctctcgaagacactgcaaggtagagctcagtgtttcactttccggagtggcttactagtggcc

SEQ ID NO: 40301 - DNA, 201 bp, Bos taurus
gatgggagagcgccaccgcaggcaaaaaagacaggcatgcaggcccctacaggcaaagagttacagcaaatagatcgggtgtgctgagactctcagctccyggaattctatcagaaaggctaccggccaggaaacgagacagacagagctgtgtcactggtcagagcctcaggctgccctgcccgagggaggccatctggg

SEQ ID NO: 40302 - DNA, 201 bp, Bos taurus
cagtgcccattctgtggccagagaccagagggagcccagaggcccaggacacctgctcctcctggtccctgccctgtggggacccagaggcggaggagccrgggggacatggggggccacagagcagcttgtctgagtgggctgattccacaggcacagctcgagaaataaacaggacgctaaagtgcaaaggagaccact

SEQ ID NO: 40303 - DNA, 201 bp, Bos taurus
ctgtgcggacccagctgcagatggacagggcccgcagacccgtgaggaaaccggggcggaggaagcccacattcatggtggaggcatttggaaagatgagygcagggcccacgttgcaaactagaaacaaacaaggagggagagtcagcccgagttgcggggggcggcggctcacttgtcctcacgtgactggcgccatct

SEQ ID NO: 40304 - DNA, 201 bp, Bos taurus
cagtcaggggtcaaacttgtaactcagaggagctgaaataaacgcatcacacagccgtgtttacatgtctgacctttctagagcattccgcccggaccccrtgtcaccatgtcctatgcagacagtgtccacccccgagtcccaggaactggccagcagtcctgctgtgtgagtggccaggcttggcccagagacagccga

SEQ ID NO: 40305 - DNA, 201 bp, Bos taurus
gatagcacttgcatctcctttgtctcctgaattgcaggcagattctttactcctgagtcaccagggaagccttgtaattctttatgctatatgaaaaaacmtgattattttcactgtttctatggtagccaaacccttctgcacatttgggaattgaacattattaaaaataaccctaaattccctaatttactaggtcat

SEQ ID NO: 40306 - DNA, 201 bp, Bos taurus
caaaagggttatagaagacgaatattaaacacagatggagatggtaaatttaatttcatggacttgttatattttactggttctaacaaacatttttgacyaggaaccatttaaatgtatttattccagacaaacatctaaaagaacttcataaatgttcattctacaaggaatagtacaaagtaataagacagttaacta

SEQ ID NO: 40307 - DNA, 201 bp, Bos taurus
ctgataacacaaatggagtggtgggggtcccaggagcatctaataacccacaaagtaatttgttcaagattaacaccgtttcctaaagagttcatacagcyttcatacatcctagatgcactgtaggcaagaattgtatccaatccttcattttgcctcttaaaatctattagaattatttgagaaagtttaccgagtaca

SEQ ID NO: 40308 - DNA, 201 bp, Bos taurus
agcagacaaagccgagggcatcagtcagcctttgtactgttgtggctctgaatgacaatgacttgaggatattatgtcttccacttgcttctaggacttaytacaccttcaagaggacaggtatttatcaatggatatgaactttctaaagacatgcttcaaatccggaagagcatgggctggtgcccccagcatgatatc

SEQ ID NO: 40309 - DNA, 201 bp, Bos taurus
ttgaaaagggctacctattcttggcgcaactggatcatgatgctgtcaatacagatcctggtgcctctggtcattcttagcatcagcctctcattcctcamcttcgatataagcatggacaacagcccattggagctgaccctaaaatcatatggtcaaactattgttccattctacatttctccgaactccaggctgggt

SEQ ID NO: 40310 - DNA, 201 bp, Bos taurus
ggaggaagggacagaaggaaggcccagccggggcccctctgggggtcttggaggaacactgaagaaccccaggggttggttctgagttccccagagacacrcccatgtaagggcatctcacactgacagatgctggaccccggacggtgcctccacagcttccggaagctcagggactttgctgccaaaggctgctgggaa

SEQ ID NO: 40311 - DNA, 201 bp, Bos taurus
actcagtgcactgcatggtcccattgtgggagtcagtaaaatgtcctctgtgtttttcctagagtcatccctccgagctagacatgccttaaattcctttkgggttccactgcctagatacagagtcatgaaaatttgaatatagggtacttttaaaaattcctgttgtctgaatctttcccaaccctggagtatatggcc

SEQ ID NO: 40312 - DNA, 201 bp, Bos taurus
ctgagcaggtgcaatgatccgtgtgcccccagggttggcagaaatgtgggcgatgctgcctggtgctggtgggctgctcgaggtcctcggtgtgtgtcccycaccctacttctgtgtctgttcatcagtgtcatcctgtgccttctgtgtccccagccctggcgagagtgccccatgctgggagcatgggctcttgggctc

SEQ ID NO: 40313 - DNA, 201 bp, Bos taurus
aacttttgtgtatttccgatttaactttgacactatctaaaaatccttccttaatggccatctaaatttttaactgtacgtctggccacctctcctaagtrttcttatgtatctcactgatgaaaattttgttgtcactttgttgacaggttactgtattgctgtccaaaaccattttagtggcagcacgggtccatggtg

SEQ ID NO: 40314 - DNA, 201 bp, Bos taurus
ggggctgcgcccttcattttggcctctgttcatctgctgtcctgggccatttttctctgccctcttccatcaggaacgggccaggtgtagcacctcttccmggaagtgctgtgcaaatacccggcatgtgattcacttgggctgtctctattccacggttcctggcccagtggcattgttgaaaacaggtttgagtttgtt

SEQ ID NO: 40315 - DNA, 201 bp, Bos taurus
tttgctgaacttaaactcgaattccttgctgattttaaaacctaagagggggaatttgggctcaggaagagaaaagtagggtcaacccactggtcagttayctgggtcacccagggttttctaaaaggggaccttcatggttggggccccaggctccttagctggtggtcagctcggagctgtgtcgcacagctggcattg

SEQ ID NO: 40316 - DNA, 201 bp, Bos taurus
ttgggatttcatcgcaaaggtatggagtgcccacgtggctgaccttagttctgactgcagcccctccagaggtccagctgatccagtctgacccaaggccycaccataaattacatcattagcaactatctagagacccaaggaccccagatctacagacagtcttttcaggcaggactctccaaggggtggatgttattt

SEQ ID NO: 40317 - DNA, 201 bp, Bos taurus
cggcatggggtgggctcaggctgcagccctcccagagggcctgggttgtgcgggacatcagtggaaaaacacctgggtcccaggaaggccacccctacccmacacgttccacaaaccagctctggaggctggagcatgggcttgagcctggtcctggaacgtggactgtggaagtcaggcccgaggctgctctccctcgct

SEQ ID NO: 40318 - DNA, 201 bp, Bos taurus
gctttggaggggtcgggaaaccccagaagccaggtgagtcccgctctgccctgtcgggctctcggtcggtctgtctgtccgtcctctctgtgtctgtgctyctttcaagccctgcttcagtctcaggcctctcactgtctccccaggattcaggactgggaacggagcccagccgggtgaggcccggagctctagggcctg

SEQ ID NO: 40319 - DNA, 201 bp, Bos taurus
aagggccgtatgtgccaactgtgatgggcagacttctgagccagcatcacagctgagatccaggagccaggtttggggttggcagtctctctacctgcccygtttgcaagatcagaggttaggggcctccctggtgttcccgtggttaagaatccaccttgcagtgcaggggacacaggttcaatccctggtccaggaaga

SEQ ID NO: 40320 - DNA, 201 bp, Bos taurus
agctggcccagctggccttagaagggcagcagaaagatgagaataaacatggaaactttctccaagcttctcctgttcttttggtggctgctgggagtggkgggtggaggggcctggaattcatcctgggcctcctgacctggtggttctgtagcatctggtgctggaccgtcattgggtggggccaccgtctcagcttct

SEQ ID NO: 40321 - DNA, 201 bp, Bos taurus
aagtgtccggtattcagggaggccgtggccacccccactggacagatggtcagaggatccatgttcttctctccatcatgtgtcctggggctgaggatagkttgaaggggcccagggggaaagtagccagtggctgtgagggatgtgggatttggctgtcacattgtaaaaggagatgtccccatcttgtagtcgacggag

SEQ ID NO: 40322 - DNA, 201 bp, Bos taurus
cccaagaccaggggttcttaaccgtgggccatgttgccactcaaagatatttggcagaatctgcaatcattgccaggtctggcaggtgctcctcatagctrgtaggtggaggccaagggtgcggctagacatcctgtgatgcataggccacccatcgacacagacaacaaagacccgtctagtcccaaatgtcaatggtgg

SEQ ID NO: 40323 - DNA, 201 bp, Bos taurus
agatttagggttttctcctttgtggggacgaattcacatacaggtgaaattcagggcttacatacagactgtgggagatcaaaacgagccttcaaattccygttgctcaggaaaatgaaaaatggctgcccaaacacaagactgagaactactgagtaaaaccagcacgtctttagtaaaattatgaggaaacacacacct

SEQ ID NO: 40324 - DNA, 201 bp, Bos taurus
tattatataacaattgtctaaaatagaaatgaacttaaatatttattttaataggagtttattacctgttctatatattgagaatctgggaaagtgttacycaaaaaagaattaagtggtggggacactttccaggaactgaccaagcccacccaccttcacaagtcagatgaggggtgggggcccagctgcctgcctgcc

SEQ ID NO: 40325 - DNA, 201 bp, Bos taurus
ttccttctctgtgcacccccacctgtccttgtctggccacctctgtgggcacaaggaccttgttggtcccactttcactgtatcccttcaggaactgcacrtagtgcgcccggcacatagtaggcccacaataaattctggtgaatgaatagggtgcctcctgggtgccaggtttcaatgcaaagttgtggttcttccccc

SEQ ID NO: 40326 - DNA, 201 bp, Bos taurus
atgccaaagggctcagatggggagcaatgatgagggaaggaggcaggcccccccacccccgcactgagcatccagagtcctcaggccagtcacttccccarctgctttttgtttaaaaaataaggaggttgattcctacaggcttttccttccccagaccccagagcatttgagaacagtgtcctgtaggccatggggtcc

SEQ ID NO: 40327 - DNA, 201 bp, Bos taurus
cagtgcatgtggaggccttcacgggtccagtcagcccgtggtccagtgtctcctcagcgcctcgctctctgaaggctgcattcctcaaacagcttctaccktgggaaccatgggcaggccgtacttctgagagcgggagagggatgaggaggccctggttgcctgggtgcggctaggaggctcacctcattacccaaccag

SEQ ID NO: 40328 - DNA, 201 bp, Bos taurus
ctcagccttcgtgcagtgaggtgaggctggtggtgacgtcttacggggcaacgtggcagccccgtaagtgggaagtgatgtgtgacggagttcagttcctmaactgtggactgcagctgccctttgacctcaggttcctaagttaggaggtgttcagggtgtcaggaggaacggcctagtcttctgagattctgagaacga

SEQ ID NO: 40329 - DNA, 201 bp, Bos taurus
tgctatttcctccaggtggcccttaggatgtaatttaatgtctctgagcctcagatgataaaataatatctactcataagagtcgtgtggacttactgagygaatgtctgtaacacatttaatgtaatgtacctggtatattgagcacctcgtgtgctccataaatacggcttttattatttttcgttcccttatgaactg

SEQ ID NO: 40330 - DNA, 201 bp, Bos taurus
ctcaacctgccccaaactgagtttccatcctgatcccttccttgcttctcctcctctgtgctccccaagtcacaggatggaaccatgacccttcctgctayttaggacatgtcctccttatttcctatttcttcagcctccatgtctggttcatcatcagagctcccactgtaccttctgaacacaaatccatctctcagt

SEQ ID NO: 40331 - DNA, 201 bp, Bos taurus
gtgtgatccatattcatggcatgctctgttaggtaaataatagtggctctgagaaagtgcttctgtgaggtccttttccttctcaaatgactttccttttyttccccctaagtacagacaaacagttgtaatttaaacagaacaaaccccacctgtggaggagacgttggtaaagacagacaagaagaattacaaacccac

SEQ ID NO: 40332 - DNA, 201 bp, Bos taurus
cctggccttgtcattctaatgtaattagtttgcaaaaatatcaattaacactcaaaacagctgacacgttttacatgctggtttgaaatgtgttaattacrccttatactttgcccttgtaccatcccgagcggcgccatagacagggattctggtcctccatgccctcctccttacatactgggggcaacatggatactg

SEQ ID NO: 40333 - DNA, 201 bp, Bos taurus
gcccatccttagggctgagatgaggcccttgtccaagccacacagcgttaaagtggggaacagctggaccgtaaaggaaagcaggggccctaacagagagragagtgtttccagaaagcccagcaggtttccccatagcctagcatgtcctactccattttgactttctatgtaggccattggtggggagggcatgatgaa

SEQ ID NO: 40334 - DNA, 201 bp, Bos taurus
ataagcagttggttactggtcttgaatggtgattggtttgcagatggagtgattaaaatcttttcctcatggcacagtcaaaaaatgattctgtcacagtrgtcaaatagtaggcagttgccatattctacaaggtaaaaacttgaatcttcatggagagaggttgtgtcctcaagaaaagaaggagtgtatatgtggaac

SEQ ID NO: 40335 - DNA, 201 bp, Bos taurus
ctggcaggctatagtccatagggttgcaaaaagtggacatgactaaagtgacttagcacacacacataatttgtgattatagaccacagtggttaaaaacytgagctcttttaggacagtgaaaattctctgtaagatactatagtgatgggtacatgtatttatacatgtgtccaaacccatccaatatgtaacacctag

SEQ ID NO: 40336 - DNA, 201 bp, Bos taurus
gaggagaatgaatgattgatggatggcgagcttctcaggtggaaacaggctggtgggaagctgcctttaaaatcatattttatatacaactgtgggtcagygcaggctcccagtatacagtgcctgaccttagtatgggggagcgatcgattgtgctcaaacagcgagccatccaaatgatttatttatgcagcagtgcag

SEQ ID NO: 40337 - DNA, 201 bp, Bos taurus
tgaagttatctttggtaggctggggagaggaaaagctgtaaatattttcatactaataatattcccttgctatgtctacataagatatcatccagcatctyagagatgtatgtggttcacaaagatgacccagacaaacacctattagaatatttagatgatttagaatagaattaattggagtagaaatcactgtagaat

SEQ ID NO: 40338 - DNA, 201 bp, Bos taurus
gcacaatgccactgccaaaaacacatgtcctcccaagccccattcacttcagtgctataaacagaattcagaagcaaccagatatatgtgcatatctgtgygaaaaggttcagaaaggaggatgttattttcacatttcctgcagaactgagttcaatttgacaggcattttcccccccttcttggaagccattttgtctc

SEQ ID NO: 40339 - DNA, 201 bp, Bos taurus
attaagtttgaagtccaaagaataccctttgacggaccagtccaagcgtcaccctctaaccattgagacaagagtcccgtttggttttattaaccatcatygggcaactttgaggctgaatacaagccttgggaatgaaatgcaaattctataataggaacatcattgtgataataatttattaaatttcccgagccgtct

SEQ ID NO: 40340 - DNA, 201 bp, Bos taurus
taaaacctgagttcagttggttttcattaatgtggtgtatctggtccaattaagcctcattttaaaaatcaagtgccttagaatggagtggcctctttcayatacttaacgtaagataattcaattgtgtgtgttgagtcaacaaaaaccaaccattttacacaccctacaactcctcctcctcaacaactttaacaacac

SEQ ID NO: 40341 - DNA, 201 bp, Bos taurus
attgccaatggccttgtgctttgcagctaataaagactaaattacactcatggtttggaggtatctcgtgcctatagtaagtcatgttacttgagcttgtrtaactgtagctccatcctatccaccttttatttgggaatgaataccccagcctcaaatctcacatttttctcatccaaagctaataactatatagcattt

SEQ ID NO: 40342 - DNA, 201 bp, Bos taurus
cgagctagttatgaactgagcatccttgcacttgtgtttctgctcttttcaacttgaactcgttgacaccgcatacccaggcagggaagctcgtggagttygagggtccttgactcagaagtggactctgatctccagcctcaatcctgtcattacatgcagagcaattgtgtctgaatggttggaatccagtctgtctga

SEQ ID NO: 40343 - DNA, 201 bp, Bos taurus
tgcaacaggccagatgttgtcccttcaccccgaggagactggggctcagggctaagtgtcttctcgtcccagatcaaatgttgaaaaggatgacagagccrggatcccagcttggcctctacaggtatggagctcatgctttctcatggtgcccagacccttccaggtgagttgagatgaccttggaaagctgaagctctc

SEQ ID NO: 40344 - DNA, 201 bp, Bos taurus
tccctgggccctttctattcttggacatcgggagcaatgaggttacatccccgatcagtgattctcaggcaggtggacagagtgcccagaggccatcaacmacatccagagacgcttttggctgtgctgactagggaggaaaggagagttgccatggacatccatggtccagaggccagcgatgctgctaagcatccttca

SEQ ID NO: 40345 - DNA, 201 bp, Bos taurus
gagacattctctaacatagaaggagggaagactgaactgaattttccagttttgatatcaattcttctagaagagagacactcatcttgaaatcttttttycccctctttgctagattatgtgtgtatcagaattgagattgggcttggctgtttctttcttggcttaaaatgtatctggcttcagtgaacataaactcag

SEQ ID NO: 40346 - DNA, 201 bp, Bos taurus
aataaaaaatagagattaaagacaattttaaagtagacagtaaccaacatgtgaatatgttctattgaccttgggtgtaaacaattgtatgcattcaggartggatagagctctagggtacccactcgggggtctggaggtcaatagaaatggggagattggttctcagaaaatgaaaggagagactccttgagccatgtt

SEQ ID NO: 40347 - DNA, 201 bp, Bos taurus
actgtcactagaaaggaaggaaagactggtaataataatatccatctctattgagaaccttctaagcgtctgatgctttatactctccatctttaacattycaactgggttcatgagtatagtttagacaagtcacttgatactgagctgtactctgtcttacttagatcacctaataaattaatgattgaactggtgttt

SEQ ID NO: 40348 - DNA, 201 bp, Bos taurus
accatgttctgatgtctgagctggagccccttctagccccagcccagcctctaaaaggcccagccctctggcacttcaactagaaacagcattgtcaccayagtctcatttctttttaagcagggcctcataaaaactcttctagcagctgtgaacgttcatcactggagcaataaatgatgctgctgctgtgattcatca

SEQ ID NO: 40349 - DNA, 201 bp, Bos taurus
taaatattcagttgaaggttggtcaaatgaattacctgcacagatgttacctgtgtaagaggctattatgcaactgccagaactaatgtttgtgtttgcartgggcttttaatggtggacagaaatgtttacagcatgtgtttaagccaaaattttgcatcaaagacatctcccgattttgttactaacagtaatactact

SEQ ID NO: 40350 - DNA, 201 bp, Bos taurus
agagaaagtgcatgaatgacatcaactcttctgattgttggaaatatattgtgctgagaaccaatgcctgatagagatcaggtttcgttataaggtcagtktcaactgcgggccactgaaatgtcaccgagatatatttcccaatgtgacattttgtaattgaaagtgtacgggtgtgactttcacttttgcatagcattc

SEQ ID NO: 40351 - DNA, 201 bp, Bos taurus
gcaaggccgagtggcagagaggcggggacaccgagcgcttgtgcaacaacagaaacgcgctcctcacgctggaagtcaggattctcagaaaactagcaagraaggcaggccaagcaccatcgccaccagccaccaaaagcggagtccagtgactgagcagctctccctgtgcccgggagagacaggagagtgccgaggacg

SEQ ID NO: 40352 - DNA, 201 bp, Bos taurus
gtggagcctttcattcttggatgtcgctacacggcctggtgggtgagggctcctggatcaagaggatcagagaggtgaccccaggctgggtatggtcatgyccactgtgctgctgctggccactcagaggtcaggttcagggctcagtcatcctgggtctcggtgtttatgtttattttttagcatgggaatggtgccatg

SEQ ID NO: 40353 - DNA, 201 bp, Bos taurus
gttgctgctgctaaccatcccccaaccctcaaatttatatccctttgcaaaagctgaaacccaaggggaactgtgatctcgcagctttcatggccagaacyggcctccaggtactaggttttaaaaagatgcccaacttcctgggaactacacgtccctcctccctcttgggagtccaaattccaagaaatgtagctaaaa

SEQ ID NO: 40354 - DNA, 201 bp, Bos taurus
gctttctctcacgagctggcagggtgactcttcagcaccacactttcccacctccatgccttggtctgcattgtggccaccttctggaatgttcttccccrtctcatttataaatccaaacagatccatcctcaccttctctgcgtctttgcgacttggccacacagaggggacgtctgttaaacaatcattcttcctatt

SEQ ID NO: 40355 - DNA, 201 bp, Bos taurus
cggcctgggcgggaggtgaagcagcaatgccctggttctggtgtctcataaatccaagtctccaggctggcttacagcttgccttctcaatctgttctgcrcgtaaccaatggccagaggggtttctctgcaaacacagagcccttaaataccttccctggatgctcagcacctgcagagttcaagcactttggcatggca

SEQ ID NO: 40356 - DNA, 201 bp, Bos taurus
aaggaaaaataattcaggagttggagctggcatttctgtgcatgtgtgtgtggaagcactgggcgcattgaagttctctggatctcctcaaggaccctccyaggtagatttcatgtagatatcatcacttgggtcttccagaggattcacaaactagctcctgtacagagagggcagagaaggaaggaggaaagaggcagg

SEQ ID NO: 40357 - DNA, 201 bp, Bos taurus
tatcgacaggcaggaggtgatgggggagtctggccacacgcctgggacccagcatctgatgggcgtgccaaatggtcctttgtttcaaggccccgctgcaygttctttctgattcccacctggacagcaaaggctgacccctctgcacatccctcctcccaccatcactcagcatgcccctttcgggccccacagatcagt

SEQ ID NO: 40358 - DNA, 201 bp, Bos taurus
atataaagtatatcataataaagctgacgaaagaaaaaaaaaatcaaagaagaaaaaaacaaaaacacaaacaaagatcctgaggccagaaaaagctgatygtggtctggaaactgtcgaggtctgttgtgattggcgaacagtaagtgagaaggagagaggcccaagatatttgatctaatttggttttcagagtagcca

SEQ ID NO: 40359 - DNA, 201 bp, Bos taurus
tggttttccttctaccctgctggcttgcccccatcagcctccttgctgatgcttcctcatcctcctgacctggcagcctttagcgtgtgggccagatccartccgctacccagtttttataaataaagtttcattagaactcagccatgccaagtctaatgacattaaatgccatgcaaattcagggagcagcatggataa

SEQ ID NO: 40360 - DNA, 201 bp, Bos taurus
caaggccatcgctatacataatcacagcatgataacccccccaaattttacattatatagtacttttatctcatctacagtccatattcaaatttatccartaatctcagtaatggccttagctatgtttttagtccaggccaaatccaagataatgtgttacattttgttgtcatatctctttatggttcctcagccttt

SEQ ID NO: 40361 - DNA, 201 bp, Bos taurus
ctgttacctgtattctccagttaaactctcaaggtttcctgaagaatctaaagcaattgaactttttctctctgtaaatctagtcggcctattgaagaacygaatgccctctcaacaagctgccagcccattagttggcaacatcaaaagcaagcagtgcacttaggaggcctcagcaatggtccaggcaagaaatgatgg

SEQ ID NO: 40362 - DNA, 201 bp, Bos taurus
gatttgtggactccaggcaactcccacgtgtgcaaccacaggaagacagtctccttctggtccaggcatctacagcacccttcagtcaggtgaggtgggcrtgaccatccccgctgcttttgatctgttcacggtgacaaaatgagatcagaggctataattattcacggtgacgactttaaatgagagatgtgtgcatgc

SEQ ID NO: 40363 - DNA, 201 bp, Bos taurus
agcggtcccttgagatgaacaagcacaagggcaagaggcgggtgcaaaagagacccaactacaaaaacgttggggaggaggaagacgaggagaaagggccygccgaggatgcccaggaagacgccgagaaggctaaaggtacagagggtggttcaaaaggcatcaagacgagtggggagaatgaaggtgagtgcacgcgcc

SEQ ID NO: 40364 - DNA, 201 bp, Bos taurus
attttggagttagagccaggacaagctcatggtctggatgtgggggctgagtgagagggacatgagggcagctttatgcggccattcactaagatggggarctttgttttgggtgggagggggcaccacaggaggagtctgggtgctgcccagggccctgcctcctgccgctgtgtgaccagtggtagcaaatccagaacc

SEQ ID NO: 40365 - DNA, 201 bp, Bos taurus
tggcagaactcaaataaggtctgcggtttacagaccttcacactggaccaatgttaatttcttagttttgacaaaagcaccaccacaaatggttaaatcaygttaacactggggggagctaggtgaaggtagagcgttaggaaactccggatccatccatccgcgcaacatttctgcagctataaaactggttcaaatttg

SEQ ID NO: 40366 - DNA, 201 bp, Bos taurus
ctttgtaaattaaatagaggattaccatattccatgatgtaacctgctagtcccacctaacagggttatttttgtgcttcattgtacaccttccggtgagrtggttttattttgaatggccgaatttgctcaggttttcccgaagtactttattgactgctgctgccagttactgtttggtaaacataggaaaaggaaaaa

SEQ ID NO: 40367 - DNA, 201 bp, Bos taurus
tttagaaataaattctaagtctgggcagtcccagatttgtggtgtctggtgagagctcccttcccggctcacagccggctgccttctccctgtggtctccygtggcacttgagctctcaagttctctggtggaactctgctcaacgtcatgtggcagtctggatgggaggggagtttgggggagaatggatacgtgtacac

SEQ ID NO: 40368 - DNA, 201 bp, Bos taurus
cgggtgaagcccagagcatatcccttcctctctgcccttttaatttttatttattttttagtagcaagcaaggcagtcattgtgcgggactgctgggggcrggaggcccgtggtcatgcggaaatccacggtgaggatgtctcaccacagtcagtacctgtgttgtctggcacattaattgaaaggaagtcaccctttgtg

SEQ ID NO: 40369 - DNA, 201 bp, Bos taurus
gcacggccacgttggcatggacaggcacgaactttcagggagccatgtgaaggaattgtctgactaacggatgctgagaacgacggttcagagcattcccyctctctcttttccatttgcagcacgttttatgaagactgggcttttgtcatggatgaagaaaggtctagcatgcttcccaccatggcagctggtaagctt

SEQ ID NO: 40370 - DNA, 201 bp, Bos taurus
attttcaagtgatgtcatctactactcagagaaattggggctcactcctcaaccccagccagctgttgactcagtttgttgaaaactatggcatatgtgcyctggccagattggggtgccttgggggtgcccttgtcaagctgtggtatcttgggggtgtcctagacaggctgcggtgggggacttggtgtttctggggag

SEQ ID NO: 40371 - DNA, 201 bp, Bos taurus
aggtgctgagaatgccgagtggtcgtggctgggccgccgagtccttcagccccgtctttggggcggaggcagggtggctcactggctggtgtggggccctygctctttctgtcccccgctcccttgcccttctaacaagcccgaattatgctgggagccctgaggagcaagatcggcccagtcctagggcagaaaccttgg

SEQ ID NO: 40372 - DNA, 201 bp, Bos taurus
ggtaaactctgcctcctttggcctgggggcaggcctgtgagctgagccatggcagttggggctttagctcctgaattgaccaagaatggcaagaatgcttragaggccatttattcaacagccaggtcctgatgactttctgtttgctcctatgggtactggccagagctattctggcttcatttccttctctgggtcaag

SEQ ID NO: 40373 - DNA, 201 bp, Bos taurus
tcattgaagtcaaatttctactctggaggcgttgtcagtggtgggaggttcggtagagtcacttatagtgcacagtgtgccctgctcatggatggtcagartttcaacacaacagcctgtgaaagggtacaaatctgtccttggtcagtagcccatttgtcttccctctgggtttgtatgagtgagtaccaagtcacatgt

SEQ ID NO: 40374 - DNA, 201 bp, Bos taurus
tgctgtataataggctctaggtttgtccacctcattagaaccgagtcaaatgtgagcttttatcgagttgtagcgaatgagggccgcttcactgcagtgckcggacttcacgctgtggtcgcttcccttgtggagcacagggtctgggacactcgggcttcagcggttgcagctcctgggctctggagtagttgcagctcg

SEQ ID NO: 40375 - DNA, 201 bp, Bos taurus
caagggcccatgtgtaagaagccctgccactcacaggagggtggcaagggtcgcgagctgggtgatctaatgcccagaaaagacccgatgtatagttggcrttcacaggtgtgttaagggacttccctggtggtccagagattaagactttacctttcaatgcaggagaggcaagttccatccctggtggggagctaggat

SEQ ID NO: 40376 - DNA, 201 bp, Bos taurus
tcccacactggtcacggcggcgttcgagccgcacttgccctgtgcttgaccagagtttccaaagctttcctggatatgatccagcccattgtgcagaggaygaggcccagatcacatggagccgcgggcctggcaggcctcgcatcacccagagcagctccatcccatgctgcgggctctctgaaaatcccctctggtctt

SEQ ID NO: 40377 - DNA, 201 bp, Bos taurus
ggagccgctgccatgtggggagggtgctgctaggccagggcccaggctggtctctgggcttcaggtctgcctcgcttgtggagcagcctctaggatcggaygagaaaggggcctttgactccaagagggcctcactagaccccagagctttatatcgagacacagcttctgtcaaggttaatttcctgaaaggtaaagccg

SEQ ID NO: 40378 - DNA, 201 bp, Bos taurus
gggtgtgggtgtcctcgggaaccttagggccttaggtggacccttttggagctggtgccactcatcttttggaggttgtgtgtccccctctctaaagaagrgaggtgactctggcctgcagggttgctgcagggagtaaaggagtgaacgggcgaatgccactgagctggcccacagggggcgctacagcagtggggacgg

SEQ ID NO: 40379 - DNA, 201 bp, Bos taurus
aaggaacacttgcctgcctggaccattgagccatgtattaatatggaacacttgccttcccggaccattaaggcgtgtattaatatgcagacacacatctycaggggggctgagttacatgcacctggttgctctaagccttagacccgttaaatgattcactgtagaatctacagtcctggacagtattcaaggacgtat

SEQ ID NO: 40380 - DNA, 201 bp, Bos taurus
ctgttttcagcagcctcactctttccaggctcttcccccatcccttcccaaccaagttccttttttgtacaagcaggtgcggctaaataattaatagggtrggaaaacttgttggaaatagtacagctcatgtttatttttaagcagctgagttatagagccctgctgcaggtgcagtgcaggtggggaaagcgtctttgg

SEQ ID NO: 40381 - DNA, 201 bp, Bos taurus
tgtgagaataggctgcctcataggggtgagctggtacccccactgctggggtgggtggtccaggcagttctggtggggcatgcaccaaactccagcctgtrgaattatgacaactgcctggtaacacaggagcatcttggtgtgttgtgcagtcccagccacgctggctgccatcgatcacagctgagaaataaagctcta

SEQ ID NO: 40382 - DNA, 201 bp, Bos taurus
aagctgagaaaaagacatcagaagaataaaaaggcaaggaaaagtgaattggtggtgactaagcaatctgtatgtcaaaactgccataaattgaacagtgygatgctagcataagaattcgtcctttcatcagtggaactgaaatcaataaccttaaaatgggctccattataattttgtaaaactcagggacaaggcaag

SEQ ID NO: 40383 - DNA, 201 bp, Bos taurus
cctgaactggcaatggaccctccaagggcatggcccaaagtcaccagcaatgctaacagggacctgggacccagggaaggcagtgacggcgggagaggccrcctgggggtggactaggtgctcaacatgcagtgaactgaacccacaagactaggagttttaagcctggccctccaaaaccagggttttccccagtggctc

SEQ ID NO: 40384 - DNA, 201 bp, Bos taurus
tgtgtttgaccagcagactaggagagatctagatgggatgctttacctggatgggcttggggagtcttggaggggcaaacataatttctgcctagcttctmttggccagaactgttgtatgcatacatgctaagttgcttcagtcacatctgactctctgtgaccctgtggactgtggccctccaggtttctctgtccatg

SEQ ID NO: 40385 - DNA, 201 bp, Bos taurus
gaggtgcgttagcacagcctgctgctgtctccaggcagtctctttagccaatccctgcctcctgaacctgcctccatcctagctcccctgagctatggctratagaaaatgttcatgcctctgcaagtttccagccaggggtttggagctgggcagcaacctggttctcctgccccagaagctccagtctttctatctctg

SEQ ID NO: 40386 - DNA, 201 bp, Bos taurus
aatttgcagttcctgccaacctaatacttgaaatattgagatcaagcatgatctccacctctccatctttcctataaattaattcattcaccctttgctamttgagtgcttgttgatatctatagtaggtctgggacaagtaacaaaaatgatgaataagatgtgatccaagtctacttggaatggcacaccactatcttt

SEQ ID NO: 40387 - DNA, 201 bp, Bos taurus
cataaagacagtaaacaaaggatcagaggagtggcccaagcaccacaaggaaatgttctgtttctgcaggatgacttgctcaagaaggatgtgttcgattyactgggagcagatatggatcaaactcttgctgagaagtgagagggatctgagcgctgtgcttctgtgccctgctcttgactcttaaaataggctcactcg

SEQ ID NO: 40388 - DNA, 201 bp, Bos taurus
cagagcctccatgagaacattctgtgggcaaacaccatggccagtgtgcttggagccccatgtcctcactcagtcccaggtgattcactcctgggattggrgctgggagctgggccaggttcctaaataggcaagggtaatggtgctcttggacagccttcaggtcactttgaaaagtaatcctttttccttaagaatctg

SEQ ID NO: 40389 - DNA, 201 bp, Bos taurus
atttaaaaggtttatgaggaaattgttggtgacaagagggctgttcaacgtcttgattataggggtttctacacaagtgacaaaattcagagaactgtacrttcagttcagctcagttgctcaatcgtttctgactctttgcaaccccatggactgcagcacaccaggcctccctgtacatcaccaactcctggaccttgc

SEQ ID NO: 40390 - DNA, 201 bp, Bos taurus
tgccaaacagggcacacgggttcgatccctggttcggaaagattgcacatgccgaggagtaattaagccacagcttagtccaccacagttactgagccctygggccaaaactcgagagtaatccccacttgctgcaactagagaatgcctgcacacagcaacaaagactaagcacagccaaaactaaacaaataaatattt

SEQ ID NO: 40391 - DNA, 201 bp, Bos taurus
catctacagtggagtcacctctccctaaactcagtgggaactgtgcttccaaacagaaaagtacccaagatctcttttgccaaaagtcctcggaatgtctmcaatcctgctacttggtgaggttccattagaatagtggtccctaacccttctggagccagggaccagtttcatggaagacaatttttccatggaaatggg

SEQ ID NO: 40392 - DNA, 201 bp, Bos taurus
agtgagaatactgggcatcagtgtcatcaaccttctagttccaaccagtctggggtctacatgcttgtgggcagcacacagttaacttctcccacctggaygggggttttcagtctctgaaaaacagcttgttttgtgtatcccttgagggggaaccaggaccttgccccaaggcttgtgcgtatctcagcatcccctctc

SEQ ID NO: 40393 - DNA, 201 bp, Bos taurus
gggcctggagatgggatgtgtcccacaggaaagacacaaagaattgccctgctccaaatgctagtagcccccagttgagaaacctgtacattaagaaacakccaggggccatatgagcctgcaatcccactctggccatatatcctgacaaaactgtaattcaaaaaagatacatgcatatattcataggagccctattta

SEQ ID NO: 40394 - DNA, 201 bp, Bos taurus
gcaaacagcgagacatgaaattctcatagtgtcacaactgggaatgaaataattggatgctgaatagccaagatgtgaaactgtgggattcttgctttccytttctataactagaggtaatagaaatgaataattttatgtaaaattgttttgtcattgactttataattaacatatttaggttcttcaatatttgaaata

SEQ ID NO: 40395 - DNA, 201 bp, Bos taurus
ggacatctggaccttcctgtctggctaatcctccagccaagggaacccaatcaaaaccaacagaggaatccaaccaagccaatcacaggatcatgaaaagyaatacattgttgttctaagccattatgttctagggcgtgtttgtcatgcagccaaggctcactgagacatgttgtaagaagccaagctgagattcgaacc

SEQ ID NO: 40396 - DNA, 201 bp, Bos taurus
acaaggaaaagaaaaagtccttaacaaaaggtctggcctggccccaggatgtcggaaaagtggcttgaggtcgtcaaaggaaccctgaggtcaggtctgcygtttagaagccaggtggccttgggaacatcccacagctctccccatctgggtctcctcacctggagaagagagtcctgctccccagcctcccttacagtg

SEQ ID NO: 40397 - DNA, 201 bp, Bos taurus
atcaatttttgttttttaaaatttctctgtagtattcatggtgtgctccaacctctgactttcaaaacaaatgaaaagctaattttcctcaagctatttcyataacaattataggcagagggataatgccttataatgtatttaaggagtttccctcgtagctcacactataaagaatctgcctgcactgcaggagaaacg

SEQ ID NO: 40398 - DNA, 201 bp, Bos taurus
ttacatgtgtcccagctctttttctcccaccatggattttcagacagttgtaccctgtcagttaggtatttcttggggagaacatgcatagctttggggtratagatatcttgtgatgattatcttctagctatcgtttcctatccgttgtgccaacagacctcacccatgaacattttagaaaatgtcagctgtgcagtt

SEQ ID NO: 40399 - DNA, 201 bp, Bos taurus
aaaggaagaaaaatattaggattaaagcaaacttaaaatacctttccccaatcacctactacagttatttgttaaatcttaagaagtcagccccaacttgraaggccaaacttggaaattcatttgaccttttggaaaggcactttggcaatatttcagtttagttcagtcgctcagtcatgtccgactcttggcaacccc

SEQ ID NO: 40400 - DNA, 201 bp, Bos taurus
ccctggttgtcccctggttaggaccccacgctttcactgccaagggcatggattcagtccctgatcagggagctaggaacctgcaagcctgtgccgcagtyaaaaaagaaaatccctcaaaataatcactgtaacattttgaatggagtcttcctgtcttttatcgaagcatctgtactttgcaaaattgggtcctaacgt

SEQ ID NO: 40401 - DNA, 201 bp, Bos taurus
aacagtacttggttggctttgattggcccttgggtttgcaaccacagtcctagatgtcccatagtggctcttctcagacagagggcttctgctgggagacrcactctggccaaattgatgtctcagtttttcaaataaaacacactctatctgaccccagtgccttggcatatgctgtaaactcttcccctcttttcttca

SEQ ID NO: 40402 - DNA, 201 bp, Bos taurus
gataattctttgccggtgggatggatggcgggcgaaagtgtgggggaggggggcaggtggagcgtgcagggagagggcctgccccttgccttgtaaggccrttagcagcctctccggtctcgacgcgacaaccgaaaatgtctgcaggtatcgctagatgtctcagtgggaggactgtcccagccaacctggaatgccagc

SEQ ID NO: 40403 - DNA, 201 bp, Bos taurus
aacaacctggtctgggcaagggcccgtggaaggagctgtggagacaagaaggcagctggcaggtggagatgatcagatcaagctgctggtagttttgcccrgggtggccctgtcaggtagcttgacaattacgcgcatcctcccctacccccattaaagttaattgagttgttatggagccacagtgagggagtgggagtg

SEQ ID NO: 40404 - DNA, 201 bp, Bos taurus
gttttgccccctgggggacatttggcaatatctggggacatttttggttgtcagaactgggagtggtactactggcatctattgggtagatgctaggaacyccgctaaacagcctacaatgcaccggacagcccctaatcaaaaattacctggcgccagctgtcagtagcgccaaggttgagaaactgggctatgagttac

SEQ ID NO: 40405 - DNA, 201 bp, Bos taurus
aggagctggccggagagacgggagccacaggcctccatccaggggattggagcagctcacgtggtgcaccccggggagtggggaagatttcctgcgaaagraggtggactgttggccggcacttatagagtggatagagtttagagaagctggtggggggtcattccaggcgggggaccagtgagaacactggtccagtgg

SEQ ID NO: 40406 - DNA, 201 bp, Bos taurus
caactaaatggtttggaatgaaaaaaagattgagaacccaggaggaaatgtttcttcccatgcatgaaagctgaatggcctgggttatagagagttatctrtggtcagatctcacttggaaggcgaatgagatccctaagggtagggcacccttaaaagatatttcaacatatccattaagggaggcctataaattctagg

SEQ ID NO: 40407 - DNA, 201 bp, Bos taurus
ttcttactattgtggaaaatagagcccactggcccaaacccaaagcatggacttggagacacgaggtgcagcgggaagcgaggctttaatgatggtcttayaggatggcctctggtgggcaggcacagccatggcagttacaacaagcattttatattttggcatgcaaggtccctccgccggttcctcattggttgagta

SEQ ID NO: 40408 - DNA, 201 bp, Bos taurus
ggggaggtgacagttgtgcgcagtagccaggcagcagccatacagctagaagccatgctttctggcagaaaagcgcatccagggcctcaggcaggtgtatycaaagcgtagttccaagaactgtagttctgtgcactttgtaaaggattacaaaacctccggaggcccacgcagcatgaagtgttctgtataacggtttag

SEQ ID NO: 40409 - DNA, 201 bp, Bos taurus
gaaggctccctggaggagctgttgcccacaccattgccctaaggtaagtgagggtggccaggagagtcagggatcaggggcatacaggccattcccaacayagagaacagagatgaagtgatggcttctatcaggaaatcacaagacatatgatattaatggtgatcagcaagagaagcagagaatggcgagagatgggcc

SEQ ID NO: 40410 - DNA, 201 bp, Bos taurus
ataagcctcattaaggcccaaaacaatagttgttacatagtggtaggaagctggtctggaaaagttaggaaatacttcctggaagaggtggcatgataaayagccttcaaagatggccaccaccaattctttccctgcttgtttttacacgctgctctaagcaccaagacggaacccatttctactcccagtgaaatctag

SEQ ID NO: 40411 - DNA, 201 bp, Bos taurus
gatactcccgacaacatggattaatctcaagctaatcatgagtgtgagagaaactgcacaaaaaagtgtacatgctctatggttccatttatataaatctytagataatataaactaatctatgacgacagacagcaaattagcagttgcacttcagtggagggtggtggctggggtggggagaagccaaggggagattag

SEQ ID NO: 40412 - DNA, 201 bp, Bos taurus
tgccatctgcatgctgagagccaagagatcattatcctccattggatctttgtgccaggaaagactgggcaaggatgatggatggctttccacaaatccayctgcaattggaggcataactcaaagctgtgtctggatttcttcttaggtacaaatttattcattcatccatcgtctcgcctattcactcactcacttatt

SEQ ID NO: 40413 - DNA, 201 bp, Bos taurus
ggagttaaaaaattttgtccacacaaaaacctacacacagatatttacagaagctttattcataattgccaaaacctgaaagcaaccaaaatgtccttccrtatatgaatggacaaagaaactggggtccatccagatactggaatattgttgttgttttagtcacaagtcatgtctgactcttttgcgaccctatggact

SEQ ID NO: 40414 - DNA, 201 bp, Bos taurus
ctgccatggcccacttcggagggcttcaaagactgggagagagagggaaatattgagacccgttttccatttcagagatttacgagggagcaaatgaaatycgcttctgctctcagacctggccccctgggaaaggaaacactgtccgaatcaagtaaataaggtcctttgtgtcagcaaaggctgtggtggatgaaatta

SEQ ID NO: 40415 - DNA, 201 bp, Bos taurus
atactaaattaatgacaataattatatagaaaaatggacaaaagacttaagtcttttggttcttcaccccaagaaaaaaaaaatatctaaatggccaatgrtagatggaaagatcagagaaggcaatggcaccccactccagtactcttgcctggaaaatcccatggatggaggggcctggtaggctccagtccatggggt

SEQ ID NO: 40416 - DNA, 201 bp, Bos taurus
taaaccagtcatgaaagaccacgtattgtattatttcaatttgatgtaatgtccagactaggcgaatctatagaaacagaaagtagataaagtggttgccyagggctgggaggttgatgagaaatgaggagtgactgctaatgggtatgaggattctttttagacatgaaactgttctaaaattgattgttgtgatggttg

SEQ ID NO: 40417 - DNA, 201 bp, Bos taurus
aagaaaaacacaaatatctccataaaaatttaagaggttatactctacattaaaaaaattaacaagctggagtatttcatacaggagttaaatcacaaaaygtctgcagtcttcactgttagacctctatacaagagagagtatgttttactttgtagtccccaacataaaatggattttaagaaaactttaagacaacca

SEQ ID NO: 40418 - DNA, 201 bp, Bos taurus
agagagtctttgtacccggaagccctactgggccctgcttggtatctgatgctgcagagcaaacaagattctcagctctgagacaaaaggcctcatcactygctgcaatagcagtggttggtgtacagtattcatgctggttccccaagccccagttccccaagggtgatgcaaaagggggacaggggccggcagacacaa

SEQ ID NO: 40419 - DNA, 201 bp, Bos taurus
taggacatgactgagtgactttcattttcactttacatattcatcataacacacaaaaaagaggtccaggatcaaatagattagggaaacagcaggttaakgagactttaacaaggttttttattgcaggacttctcagagcctttagcacattaacgtgcactcatctatccaaccagcatatagtcagtgtctaccgtg

SEQ ID NO: 40420 - DNA, 201 bp, Bos taurus
caaccggcacattacactttctggaatttctctctacagaatcatcaacatatgtgcctctgtggtgccagtcaccacggccatgcagctgaggaagtccyaactggcaaaaccaaagcaggatgagaggctcaaggctttgaaggagtgtggagagtaccacttctctactaagcacctactctgtatatagcccaggac

SEQ ID NO: 40421 - DNA, 201 bp, Bos taurus
gcttgctcactgggtccaggtggtgattactgggcccctccattgtaaagttgtgctgctttgcaattcctttccacctctaagagccttgtgataagacrtctaggttctcactggccttgtttgcctctttcctggcaaacaaatggtctaaactgaccagtgcaggcttcttatatacggaaaaaggaaactctgccg

SEQ ID NO: 40422 - DNA, 201 bp, Bos taurus
ttggccacatccaagacagctggggaacttattaaaagtaccaattaccatggacagctctttcttacagaagaattcaattactaaatgtagaaagaatmagggaaatagaaggccattataaaccaaatatcacagtaataattgttgcaagcaagatccacgggtggatgctaaaatgagtgggtgaaagtttaggaa

SEQ ID NO: 40423 - DNA, 201 bp, Bos taurus
gtatatccattggaagtatattacattcattgtatgaataatctatttttgtttcttgtaatgctggatgcgtgggttgtgttaaaaattcttttgaagtmttttagtagagaggggatcatttaacttgctcatatcttagcttctgcctattctaatttttaatatataatatgggttgaagcctagactaaatgaggc

SEQ ID NO: 40424 - DNA, 201 bp, Bos taurus
ttagatgaggactggtgctatggagggaaaaaaaaacccaaatcagagcagtgggtggcggtgggctgcacttttaaatagggtggttggaggaggcctcrctgagaagttgatgtgtgagcaattacttgaagtacatgagagatgaaccacatgctggcaacgtggggccagttaggaccaaggaatagccagtgcaaa

SEQ ID NO: 40425 - DNA, 201 bp, Bos taurus
tgagagtctcactccctaggtaagattggccctggaatcagcatgtttgaaagcttccttgagtcaagtataggtggtcctaggaccacactttaagaaaygtccctctggtctcaggccatgaaccattcagctcccacaggtatgggcttactttggggtgatgaaaatgttctaaaattgtgatgatgattgtgaata

SEQ ID NO: 40426 - DNA, 201 bp, Bos taurus
aatcttagttcccctggccagggattgaacccagagctctggcactggaagctcagagtcctcaccactgaaccaccagggaattccctcaattgactctmaattggggagattattgtaggtgggcctggcttaatcaggtgagtccttaaaagaagtcagattcaagcagaagagacttctgcttgctttgaatacgca

SEQ ID NO: 40427 - DNA, 201 bp, Bos taurus
cgtggaccctcgggaaacaggccctgagtgatggctgagcgataccgtgctctttcccaaacttgtcacatccagaaggatcactcaaagcacagtggtgkgagcagtcctgattcccaggcctcactctccgagattctaattgtcaaggtctgggaccctttgcactgaggccacacgtgggcaactctgaatgagcat

SEQ ID NO: 40428 - DNA, 201 bp, Bos taurus
caatgggagcagaggttggaatgtgcaggctgctctctggatggggccacaagccaaggagtgtgggcagcctctagaagctggaaaagtcaaggcaacakattgtcccctagaagctccacaaagaaccagctctaccaacatgttgacttttaacctgtttaagactcctgatctccagaactgtgagatgataaataa

SEQ ID NO: 40429 - DNA, 201 bp, Bos taurus
ctcctgcattgcaggtggattctttaatatctgagctaccagcggaacctgataaatatccagcaactatttattgagggcctactgtgtgctatgtaccytgctttacatgttgatcttgttttttagcctcacaaaatcctgccaagtaggcatcagtttgtaccattttatgttgagaaaattaaggcctagttgtat

SEQ ID NO: 40430 - DNA, 201 bp, Bos taurus
aatactcactgagtgcacggatcctgtcagacaaaggggtctctggtcatcagagagacaggcttctgtccccacgaagtggccatttcttattgtgaagratggaggaggtgccaggagtggctgagggagtccaatgcgggggtcctgcactaatccaggcctagtactcttcttcccccaccttccagctgtccctaa

SEQ ID NO: 40431 - DNA, 201 bp, Bos taurus
tgttgaggacacaaaggtggtcagacaggcccaacttgctccagagagatctagcacagctttggttcacagaagtaaggatgtgagaaagccactcacaytggccagctagaacccccagttctttgaagcatgtccacagagcctcaagaaggattggggaggtatatagtcttactagaatgaactttgatcaggcaa

SEQ ID NO: 40432 - DNA, 201 bp, Bos taurus
gatctcttccataccacattattatacagtaccacttttcattgcctgtcacaattttttcattacattgaagagaattgctggggaatatggtcaaggargtcaattttttgcttaatttatgtggaacccaaatatcaaagtgattatcacaagcaagctaggacaaatgattttcaatgctttatttggatatttgca

SEQ ID NO: 40433 - DNA, 201 bp, Bos taurus
attagttttgagtttgtgatttttgtttcatactttggagtgcatactgtttctttaaggttcaaatgtttctgaggccagtaaaaagctcaggcattctrcatgagtaaaacaactctgcagatgcagccccttggtccagtcaagggagagtctggccacccagtgttcatggagccactctgcttaccattgatgtga

SEQ ID NO: 40434 - DNA, 201 bp, Bos taurus
tggctggattctgcaccctgtggagccctgggcctgttactggttcactgataagtggagttggggtccagaagatcctgaggctgttgccgccacactgktgggtgaggccaggccctagagctagtgatggttcattagtaggcagagttagatcctatggtttggctgtaggacccagggatcccagagttactattg

SEQ ID NO: 40435 - DNA, 201 bp, Bos taurus
tcagggccagatgacttcacaggtgaatttttccaaatatttagaaaagaattaatatcaagttttctcaatctcttctaaaatattgtaaaagacagaayactttcaaatgcattcagtaaggccagcattaccctgacacaaaagccaaagacattataagaaaactgcagaccaatatccctagtaaatgtcaatgca

SEQ ID NO: 40436 - DNA, 201 bp, Bos taurus
ctggagtcccaaactctctgaatatggaggaagtcattttcttctttcttttcattaagaaaatgttttccagaggcctcacactgaacccattccagttkaagttggacctagtctgactctgaattggagaaggaagtggcaacccactccagtgtttttgcctggagaaacccagggacggcggggcctggtgggctg

SEQ ID NO: 40437 - DNA, 201 bp, Bos taurus
tttaattttatctacatattacacttagaaatacttcaagtttgcctttaatttttttaaaagtgtgtttcttctcagccagaacaatatacggtgagacytagatctgggaatagaaaagtttcaattccttctgttagaatgataagcccagcgagagcaggaacctcatctctcttgttcacttatttccctggagcc

SEQ ID NO: 40438 - DNA, 201 bp, Bos taurus
ctcctccgtccatgggattttctaggccattgccttctccgggtgactctctagttcttacaaattttccttcctaaagaacacgttatgctgcagggcarctgggcctatgagtcacaactactgagcctgtgctctcgtgcccaagagttgcaaatactgaagcccacgtgcctagagtctgctccacaagagaagcca

SEQ ID NO: 40439 - DNA, 201 bp, Bos taurus
aagaggagaaagcagagaaatctcaaggacacaaggattcctctattgaaaacacaaaggcatttatgatgcagaacttcagaatgggaaccctgggccayagaggctgcctgcgcttctcagttaaagctgatgatggagcagccaaacacaactcactgaggacaactctatcgaatgtcacaagtagatgcctgaggg

SEQ ID NO: 40440 - DNA, 201 bp, Bos taurus
gccttgtgctcccgccgactgtgactgtcgctcgagtcctggtggctgctggacaggttcctcaagctaccgaagcaggagatggagaccttgtcatccayggcctccccgatcttctccagggtggatgcagaggtgtgaattggagagtcccctgagtagcgggaaggggaactggagcgcatctgcagcttggcagac

SEQ ID NO: 40441 - DNA, 201 bp, Bos taurus
tttaagtcaaaatccaagagaaaagtgcttgggccaagcttgggtgagaaggaggacagtgatactccacagaaaaaacccaagaggagcaagaaagaaaygctcagtgtgagatggccgtgggctccaagcagagattccagtgggccgctgaaagttagggtacgcaaccagaagataagtaggggctagaggagagtt

SEQ ID NO: 40442 - DNA, 201 bp, Bos taurus
ggtctccgaggtaagtactctgcccactcttcccccctggaaccttcagcctgtagcctgaggtcctggctgagtcctctggcctcagaggtgatccacakgggaggtccatgtcaggagctggggctgagaggagagagcagacaggctggctctggcctctccaggcatccccaggccacttctttctccaccacagaa

SEQ ID NO: 40443 - DNA, 201 bp, Bos taurus
ggactctccactcctgggagtgggcacacgggaagcttgagccagaggagggtacctttgctgtgtgtgtgtgtgtgtgtgtgtgtattggggagagggcmccagttccctttgctgcctcctgcaggaaggggattgtcaagctcaatatctacttccaagaattcaactatcgcaccattgaagagtcagcagccaata

SEQ ID NO: 40444 - DNA, 201 bp, Bos taurus
tcctgtccgtggcctgagacacaaaactctggaattcgccatttggtactgtttcctctagcttaaagcaatgtaatacctcgggaaagagatatctgggraggcctcctttgtcataggattcaaaatttaaaaagcaaacaaaagcatcctttggttacactgtgcttaattttgccatttatctgttctcatccaggc

SEQ ID NO: 40445 - DNA, 201 bp, Bos taurus
ccgggccattgctggacagagttgagtatcccagggatgggcatgtgccgtccagttcatcccagccgcccttccctgctgtattacaccagcctggcttmactcagtcacacagcctggcctctgcagggttttaagtttctaacccttgcaatgaagtaggtgcatgtgtgctatcttttcagttgtgtctgactcttt

SEQ ID NO: 40446 - DNA, 201 bp, Bos taurus
gctctggacatttcttgggtccatggcatgtcaacaggggccagactcaaccctcattcacgagcacatcggacgtgtctttccgcaagtgtttatagcakatatcatgggagtgatgtccatggccagcactcaacagacatttattaaaaacaaaaatctgaacaagaggacagaatcttgtcaacagtgtcctatagc

SEQ ID NO: 40447 - DNA, 201 bp, Bos taurus
aactgaacaacagcaatgaaagacaaaggtggggaggtcttatcactgtgtccaatggatgtactcgatcttgatcaaccagaccaacccccttcttagargtgcagtgaaggtggggaggaagcactatgaccatcctttctctgaccaggagtttctgagccagtgtgggtggccaggctgtcaccattcatctgaatg

SEQ ID NO: 40448 - DNA, 201 bp, Bos taurus
cctgatgtgctgcagtccatggggttgcaaagagttgcacacgactgagtgactgaactgattgactgtcttgaaccattgaggggggaaaaaagaaatgytcaaactgtttaccctggcccactcactctatattattgagccccagtccaactcgctgacctccttggctaggattttccttcttgttcatgagattcc

SEQ ID NO: 40449 - DNA, 201 bp, Bos taurus
caaacccattctgccgctcaaattctatcccctccacaccctacaaaggtaaaggaaacctgacctctgcctagaaaggcaaaaggaagaaagctaaagcygacttttatttagcacctagtatatgggcttctggaaaaggcaatggcacctgactccagtactcttgcctggaaaatcccatgcaccgaggagcctggt

SEQ ID NO: 40450 - DNA, 201 bp, Bos taurus
ccctattgttattattttgaaatcccgatgcaaagttgagaagcaaggtgcccttggttttcactactgataaaggctcccaggccaattatgcagaggarggcagaatccacattccttccagccctgtcacgtgggctgactggctgcagagaccaccactgtatgactcaggccatctctggtttccttgcagggtgc

SEQ ID NO: 40451 - DNA, 201 bp, Bos taurus
tagatctctgattaggtttttaaaacatatcactaggtggggaaccggaaaaagcaagctgttcaatgtgaagtcattaaacaaataccacatttaaaaaytgattagacagatagatcaagatagattcacaccaagtgtttccttctgtgtttctgtggagggaaagaggaaacttaggctaacttggatttaataaga

SEQ ID NO: 40452 - DNA, 201 bp, Bos taurus
cctcaggcgtccgtcaatccggtttacatgtctccggtggacgcaccaccccgaaacctccacacccatggctgctagcctgaggaggccctctttcaccrcctgttcttcccctactgacacggacgacgagggcgtgcgcggcacttgcgaagatgcttctatatgcaagaggtgcctgcccggcgcggggttaggggc

SEQ ID NO: 40453 - DNA, 201 bp, Bos taurus
gtaccctaagctgattgctcaaatctatcctaggcccttgaaaaggtgaacttgtactttaaggtccaaaaactcggcctcttctcgccacaatatatgtycccgcgatgtagtttttcaagattcatcttttagtgcaatgtctgaaacagcgaggctagaggaccagaaaatctaggggaccgaggacaggagggcggg

SEQ ID NO: 40454 - DNA, 201 bp, Bos taurus
ggacagctggaggtagaggcttactggggagatacacttgtgaaaaagggcagaggggtgagctgacctgcaatatgcttgcagctgaggcctctagaacktggacaagaacttgacctgggacagacttccagagtcccaaattgagagagaggtgctgagcctttgaacccttgatccaaaggattattggccaactgc

SEQ ID NO: 40455 - DNA, 201 bp, Bos taurus
ccaggggagacaccaagtatggcaaacaatgagttgtgtaacaaattgaactccagagtgggctaggtaagaaaagtctttgtgactgataaggttgaacrttgattctgtgtccaggaaggccagctgcccagaatctctgagaaaagttagttgatattatgtgacagtccaatacagattgataggggataataagat

SEQ ID NO: 40456 - DNA, 201 bp, Bos taurus
ggcagttttcactagggagttctccagccatcacgtcatgatttatttatttttatttttgtaaatcatgccagtcatttttacttttaaattgagtcagragagaagctgtgagacttcaggtgaatgagggattgctagggttgtacagtagaaagttttaaaggttttggttttgcataatggatggtatctctggaa

SEQ ID NO: 40457 - DNA, 201 bp, Bos taurus
tgcaagggaggctgggaaatagtcttttggctaaggagctatgtacccaaataaaaacgagaattctattactaaaagtggaagaaagactaaagggcaayggacagttttggccacagatatgttgttgataacatcttgagcaaggtcatgtattgcacaaccagagaccttcccgaatatgactctgagtagatgatc

SEQ ID NO: 40458 - DNA, 201 bp, Bos taurus
actgagcgactaacactttcactttcaaggaacacttacaacgtggtattgactttagttgtgaatttgtctccctaagagattaaaagctccttgaagayagggaccatatcttattaattctctcagcttgaggacctagcatggtagcaggtgcttaataaaagcctgatacatatgctgaatttgtaaataggaaat

SEQ ID NO: 40459 - DNA, 201 bp, Bos taurus
cagcgaggagaggagagcctggcctggagtgagaagtgcataatgcacctgcttctcaattctgttttaaaagtaacagaattattggtctcttctctccrtttctgggccctttccttcttctttatgcaggaggagttgtcaaggaaaatacaatcatgtcatgaaaatttcaagtccttaacgtctgtggatgtgttt

SEQ ID NO: 40460 - DNA, 201 bp, Bos taurus
agtggacctcttccacaacaccaaggaatgaaccatgaccaatataagcaattatgctcatttaattccccattgccaagagacttgtggccagtgagaaytgagcagtggacagctcagggcttttgagaaatataatctctaaagattaaaaaataaaaagtggccagtgataggatgaggaaggatagcaattcattt

SEQ ID NO: 40461 - DNA, 201 bp, Bos taurus
tagagctgaggtgaggggctgtcaggttacacttgcactaagttggctgccaaaccaaagcctcaagtacaagaaggggtgagagacatgagacaggacaygagaaatgcccaatatacctctaaacggatcttcttgttcctatcctaaccattgtcactctaatactttctcaccagtttccataaagatctcaaaagt

SEQ ID NO: 40462 - DNA, 201 bp, Bos taurus
gaacattagaggcctggagataccagttaaacttcttagaaaatgctctgtatcttttctgtccagcacatcaaaaagtgtacaaggagatggcaacttaytagactacagcccagggaagtgggccctcagagagtcaagtcaggcatttatcagctgcccactggacatgttcaccttaacatagagaagggcctgtcc

SEQ ID NO: 40463 - DNA, 201 bp, Bos taurus
agtccagtctggaattattgtgtatgtattctatgagtatgtataattattatacaaggttctggggttgcagttatggataaaactcagtcccttgcttygagaccacctctcaacaaaggagaggaagagcttgctaggcagggacaatggagagtgataactcttccgcagaggtgagccatgtgccatgggcataca

SEQ ID NO: 40464 - DNA, 201 bp, Bos taurus
cttctcctacttttggtaggaggtcatggtcttctagagcaggccctccttaagccctgagcaagacggtgggactgggcctggacttttccacccactaygggactcctctgatgcgcagcattgctttggggctctgctggctggcagacaccttgtgagcctggaaagccctctgaaggctcctggggcctccatcct

SEQ ID NO: 40465 - DNA, 201 bp, Bos taurus
attaggtttcaatgaggtcatgaaggtggggcctccatgatgagattagtgtccctaaatgaagaggaagagaccagagtgtccatgcactctctttctcygccatggacactgtgagaaggtggccgtctgcaagccaggaagggagccctcaccaggaacccaatcatgctggtgcttttggtcttggagttttcagct

SEQ ID NO: 40466 - DNA, 201 bp, Bos taurus
tttactttctaaagttctctctggccccacaaggctaaggcaactagggtgagcagcgtcctctcacatcaggaaagttggtggaatcatctctggctagyctgaaccctggaaagtggcctcttgaagcccctgttgactcccaaaatacctgctttgagaggccaggtatggccaggtgattagggttttttttaatta

SEQ ID NO: 40467 - DNA, 201 bp, Bos taurus
cttgcctgaagccataaatccttaagattctctgtgatgtgattcagtaaatgtgaccatttcagctagatttctataatcaaaatatgtctaatataaaycaaagaggatgatatgtgatagtttgtccttattcttactctccctactactaatgttaagttgccaaggacataaaatatgcccttccatctttgtagc

SEQ ID NO: 40468 - DNA, 201 bp, Bos taurus
aactctggagacatgatcagtcaaccccagcagaaaaatgtgacggtagacagagtgctcctcaaagagaacgaatgtgtctgggactttcctggcagccyagtggttaagactcctagcttccagtacaggaggcacaggttggatctctggctggggagctaagaacccacatgccttgtggccaaaaaaacaaaacat

SEQ ID NO: 40469 - DNA, 201 bp, Bos taurus
gagactcagtttaaggcaacccgctccaattttcttgtctgggaaatcccttggacaaggagcctggtggggctacagtccatggggttgcagagagtccracaggacggagtgattaaacaataaccaccaccaggtgggcagcttgaataaaccagcatttgggaaaccccagaatgagacagggatgggctctagagt

SEQ ID NO: 40470 - DNA, 201 bp, Bos taurus
caaattccctgttggacctgcaaggtggtagctgctcctcctaggcctgcctcttccagctcatgataaacaagaagttctcaaccaaaggtgattatacyctccagggaacatttggccatgtctggagacattcttgattgtcatcaactggagggtgagggacattctattagagcccagtgggtagaggccagagat

SEQ ID NO: 40471 - DNA, 201 bp, Bos taurus
agcttgctagccagagctgccccaagacgggcttacttataatgctccaccccacaaaaatggagcccccatatctgtatcagctgacctcccctttgggyatggggccaggagttgggggtggggtgggggcaggctaaggaatttccattccctgggatctgacatctcaaacctcagtcctgaatgttaggatttctg

SEQ ID NO: 40472 - DNA, 201 bp, Bos taurus
actgaagtgagcggagaagtcagtccttcgcggtctcccaggcagtgcgtggcagagccggcctcagcacagtctaacgccaaagtgtcctgttggccgcyggacttaaagaaacctcgagggtcccatgaaaccaccttattccgctgcctgggtagcctcctcggctttaggaccggcgggcgtggggcactggagtgg

SEQ ID NO: 40473 - DNA, 201 bp, Bos taurus
ctatcttttaaagttactccttccccaggcccaagaaccacctacccgcaacatggtccagagagcaggtaagatcaggttcctgggcttccccagagccygtgggcccaccctgtcctccccacccctaccacatccacggccctgcccaccacagccttctcaaaccttctggaaacgccgtgacagccacttatccca

SEQ ID NO: 40474 - DNA, 201 bp, Bos taurus
agccccaaccagggccgcaccaagctaggaaacaaggtttaatgttttcgcttctccctgggttcttttgtagcgccgtagacctgtccctagtcttcccrtggcctcttttctatgcgtctgtctctctttgtctctgccagcttcactctttgttcctctgcctccgggcttgtttctcaccaggtgccctgcccagtt

SEQ ID NO: 40475 - DNA, 201 bp, Bos taurus
gcaggcagccttctttggaaatttcttcctaaaatcaactctagcggatggtccatgcttgtgtacaaaggctgtacagtctgaacaacttctgctgttcyatctcacaagctaggctcagaggaggcactggagttctcaggaacaagaggagtagcagtggccccacgaggtaggacctcaataacgcgaggcttgtca

SEQ ID NO: 40476 - DNA, 201 bp, Bos taurus
cttcctgttgccagctacatcaaccagaggcccactggtccctgcacactggagtctccctcctgccgcaaccttgcttagtcaatattttattcattcargagccacaggaaagggacttcttttctggtccagtgggtaacagtctgttctcccaatgcagggagcctgggtttgatccctggtcagggaaccattatt

SEQ ID NO: 40477 - DNA, 201 bp, Bos taurus
ggaccctcctggagaagagctagggcagagtctgctcccctagatgggactctgagggccatggcatcaggctggtgggtctactagtggcctctggctgyggcaccttccactgtggggacagtagtaagactccttgcctgtgtgagtcagcaaaaagcatgagaggtatagcaccagctgcaggtgaagggtccctct

SEQ ID NO: 40478 - DNA, 201 bp, Bos taurus
acttcagattgaggaatctaggcagcttgttggccctcagtcaaacgaagaatgggcgccccctagcagcagtaatcggtagtggacacggaaggatccaratgaggggcccgggcagagggggtgcggctcaagatagggtagacagccgggcatagttttcttctcacaggagctaactccttccggcatgatggacac

SEQ ID NO: 40479 - DNA, 201 bp, Bos taurus
ctcttggctcttgccttttgaacactttcttatttcctggcatgacaggatgctccaagctcatcttgtgtacttcctgacccagtttcctggcctggttwcttttcttagagaatggtgttagaaaccaagatctgagccctaggcatgcttgttgctgttgaagcattgttgcttctaggccctgtcacctgacagaac

SEQ ID NO: 40480 - DNA, 201 bp, Bos taurus
aaagtgattatgcatatatatatgtaatatatatattcctttttcaattctttttcattatagtttatcagaaagcttttagtccatgtcaatttctcttygcagaactgtcccagatggtttttctctttagaaaaatgataactaatacctttcaggaaagaagaacaacccaagggagatggcccgtgagttcatcat

SEQ ID NO: 40481 - DNA, 201 bp, Bos taurus
taatgcaattatcacaacctattatgacccgtgtttgcttttttcccagtttgttctggtttgcattgccatcttagtgtccaacatagatgctagtagaytggagctattcaatgaatatttacagagtggatgataaattcaaacacatcagtgactgtgtcatactgttataagtcccaaggctacctacatggtcct

SEQ ID NO: 40482 - DNA, 201 bp, Bos taurus
aggggaggcaaagaagcaaggagaggccctgggccacgcctgctgaagaggggagggcacgtgggtgcagggaggagggcgggaagagcagcagagccaaraacctcatggagggaggcctgaagctttccctctgtttactgccacggtgatgtgctggacttggttcagtgtggaaaccacattttttccccagagata

SEQ ID NO: 40483 - DNA, 201 bp, Bos taurus
gtcacaagcccagggtccagttaagactcttttcgcctgctgggtggtctcaggagctcttggagttggtacctgggcctgtgtcagctctaccagggttytgtggtccttaaagtaaggaatcacctgaaggcttgttaaaaggcagatctgatgctgtgaatctagaaaggggcctgagattctgcatttctaacaagc

SEQ ID NO: 40484 - DNA, 201 bp, Bos taurus
atttacccactacaaggtcattattgtagcaaatatgaatgagccttaaaggcctcacgaaaatctgtgggacagtggccaccaggcagtgcccctacccrtccatccacctgtatcttcctgaatgtttgatccccacatcaggactgcacacggcccacttttaaattattctattctaccttctagttagcttttcta

SEQ ID NO: 40485 - DNA, 201 bp, Bos taurus
gagtcccacactgtcatttactccagggcaagtgcagcgtgaatggccaccttaaatacaggtttttatgaatctatttattacatggtcggccacataayagtttgatgctgaactgtgtgttagctttacaggtacaagtgcgagtgactgaagggcctcggtgggtctggaatcaagaagagaccacaaaccatcccg

SEQ ID NO: 40486 - DNA, 201 bp, Bos taurus
aatgctacttcttccaactcaattatcttggtaacagcacacagaggacactgggcaaacagatcagaggtgactgagacgctccacttgaggccacagtytccaccttctccttctgctattactaaacccccagcgtttaggaatcatgagagacctgcctcttggagaggccaaggagcaggagaaaggctttttgct

SEQ ID NO: 40487 - DNA, 201 bp, Bos taurus
atggggcaaacaggcctttttggaattagtttctcctcttggttaatgagggtcaggggagaatgaaggaacaaaccgagatgcttggtacaacccaggakgctgaccccttgagggagatgctgatggagtggggccagggccacctctgtggtccctcgggacctctgaaatcacagaaggttagagaggaagtcagga

SEQ ID NO: 40488 - DNA, 201 bp, Bos taurus
tggctggtggagggagggggtgcacgcaggccgcgatgccccatgtgcctgctcattagtggctggcaggaaagcacaggaacgagtggacattggcacargctggctttctgttcttggagaaggccaaaaataatctcagtagatttaattaaaactgcagtgaacagatggggaagatggaaagaactccaactggag

SEQ ID NO: 40489 - DNA, 201 bp, Bos taurus
ccgaagtagtggccaccaaaatgctggtcattcgtggctacacaaagaacacactgaaactgctaatgccgaagaagatgcagcctctgtatttggatttyagagattattattattcacttcttatatgtagactacatcatgagaaatgctggattggatgaagcgcaagctggaaatcaagattgacaggagaaagat

SEQ ID NO: 40490 - DNA, 201 bp, Bos taurus
gccaagcagagctgtaacaggacgcacccgtatctggctggagagcaaacaaggtaggctttcttcctctagcacacagcaggcaccacgccacacacacrcagtgtttgctatttttgcaagtctaatagggtctgctgcgggaggggtgagagatcaccagttcataatgactctcattatgtctggtacactttgagc

SEQ ID NO: 40491 - DNA, 201 bp, Bos taurus
caccactgctctcccacatgccacagtatttgagcttcgctagaaaatacaagtctcaggcagggtcccctgcctgaatacagacaaccgtgtttagcacrtcaggaccttgatacacacagtgcacaggatcagatctgcccgtttcctttcctctaccccagacgatctctccctacaagccagtctacctggacatca

SEQ ID NO: 40492 - DNA, 201 bp, Bos taurus
agaagaaaactatctttcagtccctgagtgcataccaaataggtagcctgggaatataacctggagacccactggggaaaggtctctgggatggaaaacakttacaagacaagtaattgagaactgattatgctacaaataaattccctaaggcctgaaatccatcttcttctggaggaacctgaaaaaccatgagcactg

SEQ ID NO: 40493 - DNA, 201 bp, Bos taurus
tccatctggtttttcttacattctctatttgtcatttttctttgatagcaaaattgaaaatgagttctctgtgttagaaatgataatgatgccatgtgccrtgcttcattaaaaactgctctttgtaaaaatcttccctcgtgaaataaacacttaagtactctcttctggctgttacagggccaggagtaaaaggaaaga

SEQ ID NO: 40494 - DNA, 201 bp, Bos taurus
aaatagtaaacagagggcacccactgccctattggtcctaatagaaaacatcagaacagggctattacaaaccacctgacaggcaaggaacaacacaaggmaaagtctaaaacacacagatcctacctagtattcaaaatctgggacaggcccgagagtaaaaagagtaatacagaactcatatggtataaatatataaaa

SEQ ID NO: 40495 - DNA, 201 bp, Bos taurus
atttgatagatgtagcatacggttggggttacttcagatccttctaacaatacaggtagattgactctcattgaatagagaatcgtttatggaaacattgyggcacataagccaagttatttaagacagcataataaatttgatgtttcctttcacctgactgcatttctgaagaatattcactgttcgacacccacacat

SEQ ID NO: 40496 - DNA, 201 bp, Bos taurus
cctcttgagctatgtgccgggtgttttcaagtttgcatttgaaggctggtggtttcacccagacaacctgatcagctgagtcagactggacaatagacaaygagaaagactttgatgtgggagggggtgtggatttcaataagatgggatggttaggagtgtcaaatgacacagagaatcctaaggttttaatagaaacct

SEQ ID NO: 40497 - DNA, 201 bp, Bos taurus
gggaaggttcaggaaaatgtggctggctgtgctttggcagcccaaacagagctaggccaggcctgagcacagggaagaaagtctctgagaggtctgtggamatgtagggcccccttcttggggaattgaggtcttggtgtgcgtgctgcattttaagtcgcttcagtagcgcctgactctgtgtgaccctatggtctatag

SEQ ID NO: 40498 - DNA, 201 bp, Bos taurus
taatatgctgtctaggtttgtcatagctattcttccatggagcaggtgtctttaaatctcatggctgcatcaccgcccacggtcttgaacctaatctgatygagaccaaaagcactcagatgctccatctctccatccaaggacttgcctttgacttattctttgggcagctctgatccttacatggatgtccaagggctg

SEQ ID NO: 40499 - DNA, 201 bp, Bos taurus
ctccatcttcacacaccatcacttttccttccccaaacccatgcttccttcctttgtgcttcatgcttccttcctgttgcaccattctggctccccaggaygctggctttttcatgctacccaacccttgcatgtgctggtccctcagtctagtctgcatttctccatttgacatccctcagccaggagaacttttgtgct

SEQ ID NO: 40500 - DNA, 201 bp, Bos taurus
agcctcagaaggtaagatccaaagaagatccagagagacagtctacgggaaatacaaatgtgtagggggtcgactcatgtaccaccacccccaaacagtayatccaagttataaccactggtacctgattgtgccctttgcacaggtctttgcagatgttgtgaagttaggatgaggtgatcatgccataaatccagggac

SEQ ID NO: 40501 - DNA, 201 bp, Bos taurus
gagatggtaatgtggctcttacagctctgagaggggattttcttttccttcctgtaggattaagtggattcagcatgacatggccaatctgacagagtgaktaaaaaaaaaaaaaatcagctaacataggtgggtccagaaagaggcatcaggtccagtcaggagcatttgaggtcagcaaggaagtggaagacatgcaaa

SEQ ID NO: 40502 - DNA, 201 bp, Bos taurus
tactgtagtgggttgccattaccttctccaggggatcttcctgacccagggattgaacccacatctcctgcattggcaggtgggttatttactgctgaggyacctggaaagccccaaaactgttttcagctaatacaaaacaaactgtggaatggacttggtcctacaggctgtgctttgtgtttggtgcacagtgttcct

SEQ ID NO: 40503 - DNA, 201 bp, Bos taurus
ttacaattcgcagtcaggcttatcagtggaggataaggagctcatgcaattgctctttaaatccttcgcaagaccccctttaggccacagaataaatttcrcaacagccttctttgaatgcctttccttctcatgcttggatgtgtaatctcatgggactgttcagttcagggccccacgcaagggaatcacagcaacaga

SEQ ID NO: 40504 - DNA, 201 bp, Bos taurus
aacccaatatatatggcatataacattatatatttgtattaatgtattatatcattattatattagcaagcacatcccctagtaaccgactacagagtggmaagtaaatgtacattcctccaaaagtcccaagtgataaacagtctcctttacctcccagggccttccctttataagcaccttaaataagacccccaagaa

SEQ ID NO: 40505 - DNA, 201 bp, Bos taurus
cagtgatctcgggcatcactgagatcccctagctgggattcaggatccatctgtgaaaacaggaactgcaagggatggcccaacagtcccatccagccccratgctcataatcctggtgcctgttttgagagcgtgtcctggtaacagcaccgtgcacccttatctcaggaaagttcccattaagattactagttagaaaa

SEQ ID NO: 40506 - DNA, 201 bp, Bos taurus
cgtctgtgtgtggaccaggctgtcctctgggctgggctggccgtcctccggggtcgcggcctcaggcagcagagctgagtctctctcctctgagcctcacrtcctccaggttcattcacctggcagctctgctccaaaaacaacagaagcggagccccaggcacatttcaagcctctgtctacatcccattggccgaagca

SEQ ID NO: 40507 - DNA, 201 bp, Bos taurus
agaccactgggcttccccctgggatgctcaggacagacctacagaagaacttcccaagacagttcccaaaagggacgtgagaaatgggggccactgcagaragaaggtagaggctggactgggaggaaggggctttgaagaaagaaggagctgctcagagcctgagggggttgcccagcttcctgcagacccaaaggagaa

SEQ ID NO: 40508 - DNA, 201 bp, Bos taurus
cagtctttcattgctttcagtgaagcacacagcaggcctaaacaaacacttgcttctaaggaatctttaaaactacaacatatgcattttcagccaacagyctggcttacagcaaccattagaaatgaagggcacaaggcaccaagttaaaagacaaccttctcgtcacacaaccacactcaacaccactggtctcagtgc

SEQ ID NO: 40509 - DNA, 201 bp, Bos taurus
cagagggctggcaggagctcctggcctgtttggattgtgtacttagctgactcaggactcagttcctccgcatcgtaggcttcctgctggaccctggccgracgctgcagtccaccctgacccctccatgccccagcactggcgtctaattgacctccaagtcctgttggctgacctccttgttattcttcacctggccca

SEQ ID NO: 40510 - DNA, 201 bp, Bos taurus
ccaccagggaagtccctctgatgacctttgcttctccccactctgcctcgcaaatcccagggaatccaggccagagacgtgatggctgtggggaccttaargaaggtcggagcagagacctgactcccagcccagagggcagggatggctgcagaaagcacccagaatgctgcaccctttcacggtcagaccagaccgaga

SEQ ID NO: 40511 - DNA, 201 bp, Bos taurus
agatgcgatgtggttttgggaactgtttatatcctggtgagcagaatagaactgatgccgagtctgtatgagactcacagactcaccagggcagcgttaayggcaacaggccatgtgatcaacgctcagttaggggaagtccaggggccgtgggcgtacatgggaggagttcaggaaagagttagcctgattacagtgcct

SEQ ID NO: 40512 - DNA, 201 bp, Bos taurus
ggagacccttggggcggcagtcagactcaccaggccaggcggaacggggagggggcagaaagcagaaaagtcattcatccaatttgtcacccacctctcaraaggacactggcctaagggaagggaagtgtacgctgcagtggatggagcagccagctgcaggccaagtgaccggagatggccggggcgggggacgcgccc

SEQ ID NO: 40513 - DNA, 201 bp, Bos taurus
tctcctgcctccatcacccccttgctgtggctgccagccccactctcccattagacctgtattattcctggctgagtgcccagcaccccccccccagcacyccccacctcagggtaaacccctggaggtttcaaaggaagaagatggtccctcatgtcgaatatggtgtctataaacacttcccctgccaggcttgcggtt

SEQ ID NO: 40514 - DNA, 201 bp, Bos taurus
aagaaggtctgggttgtatactggagttaacttttagccttaaacttaagttttaagttttagcctaaaacttaagttttagctgctgcagtatgggaccrtgagacataatacacaaaactggtaggatttttcatcacacaggaacaagtgtattgttattaaaatgagaagttatgctctaaaacttaccaagaaacc

SEQ ID NO: 40515 - DNA, 201 bp, Bos taurus
ttcacttacaaaacaaagaaacaaaacaaaaacaacctttaaattcccttaagccacattaaagaatatctcatgagtctgtaactctagactggtgtgtragaaaactgaaaatgtcctgtcctgtgaaactgtgatgctgctcagggaaactaacaaaggaagaagggggtcacctgtctcccaggtgttcccctgaca

SEQ ID NO: 40516 - DNA, 201 bp, Bos taurus
ggctgaaatgaggggtacaggagactaggaagtgtggcacttcccttcacacttctacactggggattctggaattttccatcccttggccaaaggttcarcctaagtggggacctctgaacccattgactctgatagatttttgtttttttggctgggtcttagttgtggcatgcagaatctagttccctgatcagggat

SEQ ID NO: 40517 - DNA, 201 bp, Bos taurus
cacccattcattcactcgctcacccaatgatttgtacatttccctataggcaaatcctatggtttgcacaagctctaagtcatggggccaacaagacataygaaccatgagactcagaagggcatccctagagagggtccttagggacacaaagcaactggttcgggggccctgcagggtgatgggctcttccgtgggggc

SEQ ID NO: 40518 - DNA, 201 bp, Bos taurus
caggtggaagacactcaggttgtgtctagagaggagtgagattgggagaggatttctgtggggctttcaggttcagtcaagattcaaaaggcaagaggatmtgagctcaggccaggctgagtaggacagttagaggaagggtttcaaaggtgtccctttgacaattttctgtcttgatgggcaggtcctttggtttaccct

SEQ ID NO: 40519 - DNA, 201 bp, Bos taurus
tctggctcctcttcactcaccccctccccgatgcctccatctctgcggttttttaccctctcccatcaggaagccatcctaggcagcctctgcccaaccgygaaccgcgtgggccagaacctgtgctgcttgttttggggggaagtaactgtgtgtcccttctcttgccatagaaaggacatctcctacctagtttgtctt

SEQ ID NO: 40520 - DNA, 201 bp, Bos taurus
cttgcctggagaatctcatggacagaggagcctggcaggctatggtccatagggtctcaaagagttggacataactgaagcgacttggcccacgcacccayatccctccaaattacaaacctggggtcttaattcagaagaggaaaatgtggctggaagaggcccagtggttcatcgggagatcgtggttctgtggctgag

SEQ ID NO: 40521 - DNA, 201 bp, Bos taurus
aactaacacactctctcagaattaaatcagaatgtaaaccagacttagaggtttatatgctttgcttactaattctcacaacatctggccaataatacatmctcaacttctttctaaacttagggttttcttatgttacctttttattacgccttactgattccccactctaatgtgaagcacaaatagctctagcagagg

SEQ ID NO: 40522 - DNA, 201 bp, Bos taurus
gcctgccgtcatcctcccccggctgtgtgctgggctccggggacgggaacagcttggccacagcccgtcctatggaaacaaagtggccaagacagagggayacaccccaagtagatggtcccagagtgccatgggaagcgctcccggtgcaggaagaaagttctgtgctctcatgggggaaagggctctcggcttgctgac

SEQ ID NO: 40523 - DNA, 201 bp, Bos taurus
attgggactctccagtatgtaaggaggtaagacactgattccctggcttgactgtgtcctagatgagatccggggcctaaattttaacagtgtgcggtgtycccctcagagctggtctttgtctgccgttttgattatcagtcttgggcccgtgacagttggtacagaggtggttatctgtttattgggatcaaagtgctc

SEQ ID NO: 40524 - DNA, 201 bp, Bos taurus
cagacgcttaatgaactgagcctccagggaagcccatcgtagtacatttacaactcataagaaaacgggtcctagaggggctgatatttcagtatgtcaaygcaggtctgattttatcttgagaacaaacatcacaactgtccaatcaggaaaccagtctagtcaatcatagtagagcccccaattcagtcatgtggtgat

SEQ ID NO: 40525 - DNA, 201 bp, Bos taurus
agtgccagacaaagagaataaggtcagtgagagatcatttttccagaaccacacaagcctcctctcccctctaagaaagacctggctccttggccagttcycttcctaccattaggattcttcattcatgttaaagtagaaaccaggaggttaatttttgctacgtcaaccgtcagatcaggcaccagctgaggccttttt

SEQ ID NO: 40526 - DNA, 201 bp, Bos taurus
cctgaccccccatccctccacaacactgtatggcagtgccctgtcctctccaccagaccatgagccccagctgggtgtcacacctgccccgaggccggccytcgacacagtgggttggaagtttcgggagaatggagcccaaaccggaggagcccaaagatgctgtactcccacacatcactctgcccaaagacaggtgtg

SEQ ID NO: 40527 - DNA, 201 bp, Bos taurus
attttccatgcaaacgtccgggaaactcttagcacaaacaactgtgtccattatttccctaatgtgtcttgaatttgagccagggctgtgttaaggtctcyagcacttgctaattagattggccaacccagaaaggcagggaggaggaagtacacctgatccttctcagagggccaaccgctcctttcagaggtgcagcga

SEQ ID NO: 40528 - DNA, 201 bp, Bos taurus
ttctccctcagaaacaaggctggaacatgagggaatcctccccacctcccctgttggccaggctttcccatttacccgcttaaggtgtggccttgaggtcmctggttttatatggttgatggtggtgctggaggtggtgtgtctctgatctagcctcctgctcaaactggccccaggcttagggacaccagagctgagcaa

SEQ ID NO: 40529 - DNA, 201 bp, Bos taurus
attactacctctatactcataagcatgtttacacacacacattccagacagctctacgtacacgtgcgtggcacgtgtttttatgtacagagtgtgtgatycgtgtctgtgtgcatatcacacccgtaactccccttgccctctttactctgtagttctagcacctgacacattgcctgcgtttcaacacagtgttttaag

SEQ ID NO: 40530 - DNA, 201 bp, Bos taurus
tgccaccgtcctctgagcacacgtgtcttctcagtgaaatgtgaggtgtgtggagatcagggctgaagaaaggtgtgaaacagcacctgtaagggggatgmtgggaataagcgtggggcccgtctgggctgctctgaccttatgtagaacgaccagcgtggttctgcaggaacttcaggacactggtgtgggtgccctggt

SEQ ID NO: 40531 - DNA, 201 bp, Bos taurus
ggggacacagatgaggccaacacaggtgggaaatctagagagtggcgaagtgaaaactcacacgcaccgagcgaggaaccctgaacagaagaacaatgcgygacaagaggacagcaagggggccttggtttggaccgactgtcagaggagaccactgtgagggctggcacctgaagtgagccttacaggatggatagcaga

SEQ ID NO: 40532 - DNA, 201 bp, Bos taurus
ggcctaaatcgctgtcacgtgtgcccccatgggacacctacttacttcatttaccaacatggacggtccctttactgggcactggacctgggcaggacgcygcctggccttcggggaccccggcagctaggagtagcctctgaggcgcggtgatagccgaggcccagctcacgggctggtcacctcccttcttcagacctg

SEQ ID NO: 40533 - DNA, 201 bp, Bos taurus
taacccattttagatacgggacctgagctgacactgagggactacaacactcagaatttgccaaaggaaaggtaagcttaaaaaaggaaaagaaactaaaygctctaacagaagttcagagtaagtacaaaagggctcaaaggaagagagcttacttctacttagagaaaatcagaaacagcttcataaaaataatagcac

SEQ ID NO: 40534 - DNA, 201 bp, Bos taurus
tcccaacgcccatcagtttatgaaagaataaacaagaggttgtatatatccgcacacaggatgctgttactcagccataaaaaggactgaagcgctgataygcacctcaacatggatgaaccagcaaaactcacagtgagagaaaaggggccagacgtgaaagcccacacacatgctgtatgatgccgtttatacgtgaag

SEQ ID NO: 40535 - DNA, 201 bp, Bos taurus
cctgacacctccatctcctaccccttcttcctctaacttgacattacactgtgtaagtttcagctccaggatatacctcattcactggtcaccatctccayggccaccaccccagtctcctctgccatcctccattgcctgcatgttggagcagtcacagttcctctacctgccatccatcctttacacagcagcccgagt

SEQ ID NO: 40536 - DNA, 201 bp, Bos taurus
ccgtcccctacccacccccggccaccccctcctccacctggaggcccggtgggtgcccgtgagccccttggtgaccctgcactcatatcgttttgttttcrttttagatgtgggccattttttaaagtcttcatcgaatctgttacaacatttcttcgcttttcatgtcttggcattttggccacgaggcatgtgggatct

SEQ ID NO: 40537 - DNA, 201 bp, Bos taurus
acaatgaataggactcagttcatactacctagggcccaggttcaattcctggttggggaactaaaatcccacaaagccaagtatggccaaataacaacackaagaaaggggacttccagtaacctggaaaaaatgctggctcactgcctctggtcaggcttgaacaagattctggtcaaggtgaacactggcccccgacca

SEQ ID NO: 40538 - DNA, 201 bp, Bos taurus
agtcgccaagcagcgagcccttcggatcgaggatcaccaccttgttgacctcgcgaagggtcagaaagatgtagcctttcttatccacggacacagaaccyggctggcagccatgcaggccaggtccccggtactccccaaccacctgacccagcccatcacagaccaccaagctattctgctgccaatcggaccctacaa

SEQ ID NO: 40539 - DNA, 201 bp, Bos taurus
atcctgacctgtaaagagaggtactggggtgagagtgagcctgggggaagcagaagagacacacaggatggattgtttgcagtaaaaaggatgggcttggrgagttggccccacagctgcgctaaactcctttcccactgcccatccatcctccccccagcccagcttatcagggatgcggaagaggggctggggaggtgg

SEQ ID NO: 40540 - DNA, 201 bp, Bos taurus
tccccgaacacacacccggaccgcccctcggagacaggacgcccaatccccgcctccaggtgccccactccgagttcaggccctataaatgctacctcacyggagatccaccctccctactcccgcggagagctccgcaggattaagtcttgtgaatcccgacccccaccctcccccaggccccaggggcagatgagccct

SEQ ID NO: 40541 - DNA, 201 bp, Bos taurus
cgtgccccagcccattatgtacccagaggtgaccatcagggcacccagggtgcttcctgccattggcacttgctgcaagagtttaggggtgcttctcaggrtcccatcaggagggcttcaaggaggaggcagcatttcaacaggatctcaaaggaggagaaggtggctaactcaggtggtgcctgggaggccgagcagggg

SEQ ID NO: 40542 - DNA, 201 bp, Bos taurus
ggctcctcaccgggatccctgatgccagagggcctctgtcctcatgctccaccttgcctagaccctcagcactgccattccaggcccgggcaccatcctcratctctgctgggtaacaaggagagctcagaagctgtacaatgggaagggtcttgctgtccccccagctacacgcaccgcgacctggctggaccaggacaa

SEQ ID NO: 40543 - DNA, 201 bp, Bos taurus
tccacagccctgagctacctacagtccctagaatgccttccttcccctggaaagacagtgacctctataccaccctcaccacctggctaattcttcattckttgatagttttgcgcttcctctttgacgtcttccttgattacccttccttcctcccaaactaccacagctctttccacacgaggccgttagcctttgagg

SEQ ID NO: 40544 - DNA, 201 bp, Bos taurus
aaagcattggagcgtcagcttcaatccttccaatgaatattcagtatgtatattctttttcatattcgtttccattgtggtttatcacaggatattgaatrtaagtctctgctatacaacaggccctgttgtttatccagtcttcatataatagtttgcatgtgttaatccaagagggcttcccaggtggccctagtggta

SEQ ID NO: 40545 - DNA, 201 bp, Bos taurus
tgcaaagcctcacagttatgggaacctctcccagttgtttggccacctctctcttttatgagcttcaaagcctgatttattcactctcaaattcccgcagragggcgtagggcctataatttgggagcgtctctgctggggtggagcagaggatatctacgaggtaatgagcctgacagcccactcctacaggctcttcag

SEQ ID NO: 40546 - DNA, 201 bp, Bos taurus
gagcctctggcttaccaaggcttacatctttttactctattttctttattttcttttagataaaagctatatggaagtttaaatgttttcttttccacctkgatggactgccttgggaatcctctctgtgattcaaggcatttcagagtccacagactcaagaaaaattaatagtaggtcttttgagaacttgctgggagt

SEQ ID NO: 40547 - DNA, 201 bp, Bos taurus
gtgacccccacctcagctgcccaaatcaagtgggcccaggaggggcgcaatgcccaagggtccccactgtccaggtgatgtgcgtgggacaagtagcttcrgataatgaggcccccagcccctggcaggggacacacaagtttggagacaacagtgaggccaagaatgtttactttgaaaaatccattcgtcacagcccct

SEQ ID NO: 40548 - DNA, 201 bp, Bos taurus
ctctcgctgcagtggcgtctcttgtggaggctctgggcacgggcttcaggagttgcgccacacaggctcgctagctgaggtgcgccggcttagttgccccrtagtaacttggatcttcctaggccaagggttgaacccgtgtcttctttattgcaaggcagactgttcacccctggacccccaaggaagccctgctttttt

SEQ ID NO: 40549 - DNA, 201 bp, Bos taurus
attttggggatcatgctaatggtaaaaggcccatctttcagagatatgtgccgaaatatctaaggatgagatggtaaaatgtggggattgttttctgaatmatccagtggaggggggagagctggccgcgtggccagggatggtgtcggaggtgggtgaagagtccagcgcgttcaccgagctggcccctccctttgtgtt

SEQ ID NO: 40550 - DNA, 201 bp, Bos taurus
cacagtgtgaaccgctgactggtctccctggatcatctcccgggcctctcccgggggaaggagttggtgaccccaggccggccaggcgcactcaccgagcratcttgatgtagtaatgtgtcggctttggcatcagaaactccccgggaatttccacctcggccgtctgtgccgagaagttgctcagaaaccggcacttct

SEQ ID NO: 40551 - DNA, 201 bp, Bos taurus
ccgctctgggcccccttagctggttaatccccctggggaagccgagcaggttccctcgttctcagttgcgtccgtcactggagaccaaagctgagtcaaaygggagccgtggcgggcctcggagggaggggacgaggatggagaggcctgctggacatgtccccctctcctcacgctgcaggttctggcggcagataggcg

SEQ ID NO: 40552 - DNA, 201 bp, Bos taurus
ctacctcccacaccgccgggccaggccctgtcgtcacagtgacccacgctgggatgcacaggactgagcgcagagctcacctgccctgtgacaggctgaakggtgtggccgtgtgtcacctcacctgcaagtaagcgtcaccatccactgtggtggccttgagaacactgtgggtccagagggggctgtgcaagagcggag

SEQ ID NO: 40553 - DNA, 201 bp, Bos taurus
actgtgctgctctgcgtctggccaatgctcaaagcaaacaggagcttccagccaacagcgaacacttcccaagtgattttggccatgaaggcaggaacggyggagtgggtgtagctgtttttcaaggttacctaaagtatattccttaccactcactgttcttaagttatcttctctccacaataggccactccccaaatt

SEQ ID NO: 40554 - DNA, 201 bp, Bos taurus
cttgttgctgttcttgctgacacaactgctttattcgtttggctaaagaactcatggaaaaatcaaggggcactattttcttgttaattttcacagctacrtccactgtagctgacgcactctgggctttcaccgactctgcaaggacactgggatttaaaggaatcccttcttttgtaaaacgctttgcatttggggatg

SEQ ID NO: 40555 - DNA, 201 bp, Bos taurus
atctgacattcgtcattttcttagcttgtgttctaagtgttatttattacaagtctgggtactgcattttcaaaataaaaaaattttaaaacataaatttrcacctaccaggacggctcagattaaacactaatgacattgctggcagagggcgagtgtaaattggaacaagcactgcagaacactaactctgttttctaa

SEQ ID NO: 40556 - DNA, 201 bp, Bos taurus
cagggactccctggtaccagtgctttgatgagacgtcatctggagccctggaggggtgggaggcttttacatacagccctcatatcggccagtggcgtttyggggaacaaggaaacccagcaggcaggagccccctgggcagacccctgcactcccggtgagcacagactccccagggcacactgcaccctgctcctcacc

SEQ ID NO: 40557 - DNA, 201 bp, Bos taurus
ctgactccagcagctgtaggtagagggctgcttttgtaaacggaagaaaacttttcccaggccctcccacagaccctccttcatttctcttagccaagctracatttctctccaaatccacgcccattgagagagaaagaccattcagtgcagcaattcgacttctgggtaaaagcccggaagaactgaaggcagggctct

SEQ ID NO: 40558 - DNA, 201 bp, Bos taurus
tggaaggacttgcctctggtcagcaaggctggccctgtgcagttgcctttggtgggacagaggtgtatgctgcagatcccagaggactccctcaagggagrggccttctgggatgggccttgaaggatgcataggagaccaccaggctgctgcagacagaggtggccaggagttcttcagcccgaggtgggtgggtggggc

SEQ ID NO: 40559 - DNA, 201 bp, Bos taurus
gggagaatgccgtccctgcggccagccacaccagcattccggggagcgcagggtttgaccctgaattgggcaggattgccccaaagcgcggaacgctcagyccgcgccgcgacaaaggagcggccagggagcgctgagtccaaggttggcctgtcctttggttttaaaacaaagcgaaagaatattgtcagtcgggctgcg

SEQ ID NO: 40560 - DNA, 201 bp, Bos taurus
gggaccccttattcgtgacccctcacggccgaagccacctcgggtttttctggagagaagatgctggaataatgcatgatgatgaccgtactgggggatcygcggtgggggcccggcatgtcctaatcgctctaccatggatgctgcatgtgctggtggggggacgcttatgtcctctgctgaaacactctgactccaact

SEQ ID NO: 40561 - DNA, 201 bp, Bos taurus
cgaagcggctgccccgcaccagcaggtgcagcaggaagcagagcagctccaggcccgcggagaccaggaagaagatgagcgtgccggcccgctcgtccggmagcagcagcttggtgaggatgcggctcagcgagaccatcactcctgcggtgcctgaggaggaggggccgtgacgcccgccccgccctccctctcggcccc

SEQ ID NO: 40562 - DNA, 201 bp, Bos taurus
ctgtggagccctgtgccaaggtcacaggtgcgcagccccacaccagggtcgtctctggatctgactgagccccatagcaaccattgccatgggctcccctkattgaatctggccagcttcctgaccccgtattaggtaaaaacacccaccctcacccatctcctaatcccacccttccggcaggaattttctttgtcccga

SEQ ID NO: 40563 - DNA, 201 bp, Bos taurus
gtcatgcgcggttcggtcaacgttgtgcttggaaatgtcccgtctacgtgatggcgagtttgatgtgttcacctgcaggcctgcaagacccaggcatctamgcagacacagatccagctgtagctccagagctctgggaggaagtggggacattgcacggtccgctgacttctgtaaaggccatgatcctctctatcagct

SEQ ID NO: 40564 - DNA, 201 bp, Bos taurus
tcggaaaacgggctggttgatcagaaggtctgtgcttctgaatgaagggtctgaaaatggttccacttcacggcaaagccaggcctctaacaccatctgtragcgtcacagcaatcggcaacaagcacgcggaacttcagcttcctcgggacgtccgcagaggcctcgtcaccacctcagaactgccttttcttggtgctg

SEQ ID NO: 40565 - DNA, 201 bp, Bos taurus
gctgactgacgggctgctgttgtcagtagctgtcagttatcacgccatcagaacatggagtcgtttctaagctgagcttactgtcggtttgcaaagcgccrgagagaagaggcctgaaaggccagcacgtgagctaaacaggtccggactctcagacccagagggtcgtcaggagtccgctctgaccctgccccggttctc

SEQ ID NO: 40566 - DNA, 201 bp, Bos taurus
gtgaggctaccatcagccttctgacggcacgtcaggaggagggccatctgcctcagtcatctgagaccctgaacagtgacgatgtccacgaccggatgtcmggagcagacgatgcgggtgctggggcctcaccgtggtgggacagagcagcatggtgagagactgcatcaagcaactctcaacagcgctcgatgtaaaact

SEQ ID NO: 40567 - DNA, 201 bp, Bos taurus
ttcttagaatttctaaaaattctttctagaactgcaacagttatgtgctcctgcatcaaagttcagacaacgcaggatgagacacaggcctcattcaggckaagcgagagggacaccaggacacagctctgctccccacaaagagcagagcctttgggcaacattcactccacacacctgcctttcttctacacatatggc

SEQ ID NO: 40568 - DNA, 201 bp, Bos taurus
cggaagtaattacaggcaaaaatgacatgacttctagtcctctcttaaaattctccaggaaaataaaacaacacattcttcctctcaaatctcttcaattrtaacaagatcatcaaaatgttgataactgcaatggcaccccactccagtacttttgcctagaaaatctcatggatggaggagcctggtaggctgcagtcc

SEQ ID NO: 40569 - DNA, 201 bp, Bos taurus
ccttctctccctgctctcctttcttggggcaacagtgtggccagccctggggtcctccctgttggctcccctcctggccaggttagcatggccacatccakcaggaagggaggtctgagggtggcaaacacgggtctgacaattgttttcttgatcacattcatgttgcacttccagacaaaccaaaccagtgacaacttt

SEQ ID NO: 40570 - DNA, 201 bp, Bos taurus
gagggcgtctccgaccctctctgcatccccgccagccccctttccatcttcactcagtggggccagcgccctggtgatgagcctgtgtcctcagccttgcrgtcgccttcactttgagggaaagtgagttgggggagggtggagggaatcctctccccacccccgaccctgctcgctaacccaggaagatgctgtgacttg

SEQ ID NO: 40571 - DNA, 201 bp, Bos taurus
gctgccccctccccgagctggcagctcccaagaaggctggacccaacccccgggtgatcccagcgtcctgttggtaagggagggagaaattcagagatccygtccagcggccccgctcccttggaggaggctcccctcatccctccaacattacttccaagtcctctcccttcacaggagaatgcctttgcccccagggtg

SEQ ID NO: 40572 - DNA, 201 bp, Bos taurus
gcgctgtcgccccagctcccaaaacggccctgccctcgggtcaggcctaaactctcctggtggtggaaggccatcccgggcctcgggcgtgcgtcgctgtrtgccttgcttttaagatgtcctcctccaacccccaaatggttttcaaggctctgtggggccaggagggcccccgggtgccccggcccagccataaccagc

SEQ ID NO: 40573 - DNA, 201 bp, Bos taurus
tgaggccagaacggcagagtcctgatttagaaagtcaggcagcgacgcaaacccgcaaacccttctctacagagcagagtggcgaggcctcccagcccgcrctggagagacagcaacagccttgctcttgtgggaagaaagaagaaaggagcccacactcctctatgcgtgtgtgctcagtcgagccccactctgtgcgac

SEQ ID NO: 40574 - DNA, 201 bp, Bos taurus
gagcacccaggaagtcagagaagctgggaaaacccacgtgattgggactgaggatctgtttccagagaagcagatggtgtgacagaccacaccagcagccygacttttcagggtccgctgtgaaccctgccggtcctgtggggttcctctactgagccttcgttgtctcctcacccggagacagaggcaatggctcctgac

SEQ ID NO: 40575 - DNA, 201 bp, Bos taurus
ggtccccccacagcgccccacgacaccccccacgccacaccccggcccttctcccaaagtgctgtgggaacgccgtgctctgggaaacatttctggaagayattagaacccaaacatttttcaaccaaaattttagaaacccagaccacttccaaagacgaccgactttgaaacctgacacttcaaatccacttttcgaat

SEQ ID NO: 40576 - DNA, 201 bp, Bos taurus
gttggacacgaccgaagcgatgcagcaacagcaacactagcatgtcttccttgatggcaggcgttacgaggaggcggccaggccacagcacactgtgtgcygtttgcacaacacttgtggggtgcccagcacatgccaggcacacacgagggcaaagatgcctcgcctgccactagggccgtgagaccatgacatcacctc

SEQ ID NO: 40577 - DNA, 201 bp, Bos taurus
ccctgagcctcaggagctgctctcactttctagactgtggccgcctggcttctgtccctgagaccaagccctatcaccctgagggagaacccagtccatcyggggtcctggtggtgccaggcccgcaaaggacccccctggcagtgctggtggttttgcccaggctcgtgtgagggcaaggcaggggctgtgtgtggaagc

SEQ ID NO: 40578 - DNA, 201 bp, Bos taurus
caggggagaccctcagccgctgcctccggggcgaagcgggccagccccccggccggggcggccacactcagtcacacaggctggctccctaggcccctccyctccgtctcctgtgtctcttctgtgtcctggtgtcagcgctgtgggacatgcccatgatacaggcgtgtggttggccctacggaggctacggtcccgggg

SEQ ID NO: 40579 - DNA, 201 bp, Bos taurus
caaaacgctgcagaacgagattctagaaagtggccaaggaacccacaggaaggcgaaagaagggagacacagggaacagggagcgtaagtgaagcggcagrtgtggccatcgggaggtcgagctacatttaatgtgagcgacgtaaatgcactcattaggaggcagatgggcagcgtggatacacacacacaacccggtta

SEQ ID NO: 40580 - DNA, 201 bp, Bos taurus
cccctagccccagccctcagaagggcgccaggacctcagcccgcctggccaccgcgacccttccccaggtccagctccgtcacaccgggcgggcactgccygggttggaaacaagaggggagggccggaccctgttgggttgatttatcgttcgtcagagagcctctgggttctaccaggaagacaggaggccacctcccc

SEQ ID NO: 40581 - DNA, 201 bp, Bos taurus
gaggggcaggtgctgaccgctgtcacacggagctggtggctgtgacagtcagagcccagtcgacccaccccaacctccctaacgatatcagctaaagcgtygaggccttggcccggcactacctgcgcgttctcacgcccgcactcccgccggacggggccggagtctccacccacccccatgaccagctctggccaacag

SEQ ID NO: 40582 - DNA, 201 bp, Bos taurus
aaccaccaccaaaaaaaaagcaactaaagaaaagttctgctaaggttatggtgaaaccagcacaatttttttggaaagtcatttggcaacacagataaaargcttccaaagtgtgcatagctgacagcagaagagaggcttaatgacgaagctgaaacttcccgtctgagaccagggacagcacgcggatgctgccaccac

SEQ ID NO: 40583 - DNA, 201 bp, Bos taurus
cccggactctgccccccgcctctaggttgctggggtggggggggacacatctctgtcacacacgccctctgctcgacttagatctgctggaggtcctgagygacgtggatgagatgtctcggcggagaccggagatcctgggcttcttctcggtgcggagcagccgcgggccccagggggctggggcgggaggcatagcca

SEQ ID NO: 40584 - DNA, 201 bp, Bos taurus
ggaatcaggatggcttcccagaggagagggcactggcacagggccttggcggatgagcaggagtttgccacgcaggcaggagaaaggagggagagctcttkaggcagcaaatgtggccaggtgcctgtgtgcggagaaggcaatggcaccccactccagtactcttgcctggaaactcccatggatggagtagcctggtag

SEQ ID NO: 40585 - DNA, 201 bp, Bos taurus
ctggctgtccggaagtggccgtggtcagggcggcgtggcccactggtggcttctcgcctcacgtctacgcggctgtggcgcggcccaccttcctggtagaytcagcagcgcgtctccctccagtgaaattccacagaaacaggaggtgagtcagcacaacgagcaccgagctccggtgttgggcgtccaggctgaagtccg

SEQ ID NO: 40586 - DNA, 201 bp, Bos taurus
cacgggatcagggtgcaggagggccacagagaagggaccctgacccagctagcagacccctctgccctcctggatctgtgctgggcctgccagcctccttrtggctgaagactctgctccccaaggtggagggaagggaagaatggctggaagaagcctatttgtaaccaggacccttggccacctgagtgtgggcagcgt

SEQ ID NO: 40587 - DNA, 201 bp, Bos taurus
cctgctcggatgagaccagggcacccagccccaccggccgctcacctgtccgcagatttaagtacaacactgtttatacctaaaaccatgacactctcccracactggccacttggtgccacccaccaaggacacactccagacagagctggaaaaacactggtcccagcgcccgcgggcctcacggggcatccaggccgc

SEQ ID NO: 40588 - DNA, 201 bp, Bos taurus
ccgccctcccgaccctgcctgccactgggccgaggggccgcagagggacctggggaggtacagcagcggtcatctgggcctgggtccctgaatgagcatgygggctgctgcccagtgaccagaacatcggagctgggctcaggagagtgagcccaggccagcccctgggcgcagcctggagagaacccatcttctcccaga

SEQ ID NO: 40589 - DNA, 201 bp, Bos taurus
cccgtcaacagtgcgcaaggttccagtctctcctcattcttgtccaacatgcttacttgccctcacccgctttttgaccatggccgtcctaacctcacagrttttgatgtgcatctctgtgagggttagtgatgctgcccatctttccatgtgcttctgggccatttgcctatcatcttcggagaaacaaacatctattca

SEQ ID NO: 40590 - DNA, 201 bp, Bos taurus
agggtggggtggaaggcggggctacagcccagggctgcctaagacggtacttctagaagctccaggaaggccagggcccttcaaccctcaatgtaaattcygtcctctccttcttcggtgctgaaatatttaccagtgcacagaactcctgttcagcactcgctgaagaatgacccgttgaccccacgggtgtttttgggc

SEQ ID NO: 40591 - DNA, 201 bp, Bos taurus
tttagaggagcctctgctcaaacaggaccctgcgacgtccgcactttttctgtggctgttgttcaaccgactaataacatatctgagggcccgtaattctyacttaccctcgagagacgccgcagacagctataactaaaggagaccaaacccagactgtcagggcctggccccgccgggtctgtcctggggtctctgaaa

SEQ ID NO: 40592 - DNA, 201 bp, Bos taurus
aagaagctcagggaccaagagctgacccagggcctggagggtcctttccgagcgggtcacaggcagtgagtaagagggtccagccaagaagcctctccgcygtggctgctgcaggcctggcctcctgggagacgcacgcagggtggggcaggctgcaggaccccgccttctggggcatcggggtggcctcctcagacctgt

SEQ ID NO: 40593 - DNA, 201 bp, Bos taurus
gatctctaaccccagaaagcttgtgattttgtagaggtgacatttaaaaataaacacacaaatgaatatggaattataattaaaatatgttctctggtggraaagagcagggtgctatgagaacgtgtcgtgtgggtggtgatagtgtgataggcaatttgtgtgcctgtgtgctcagtcgtgtccaacacttttgggacc

SEQ ID NO: 40594 - DNA, 201 bp, Bos taurus
aaaaattgatttgaagaaattatgtctgaaaatttcccacacccaaagaagaatacagtatcctggtatagccaccacagagggtccgaaacaagatgaayccaaacagacccacatcaagacatattagaccatctctacatttgaacattcaagttgtcaaccttcaaagatgtcaacatgtgttttatcaacgtggga

SEQ ID NO: 40595 - DNA, 201 bp, Bos taurus
atctagctttatttctgagccatttgaaaatgggacacaaaggtttgcatacattagccacttggtaaataccagaagaacagaaaagaaggtgggtagamaggcattttccagcttgaaaaaaattgtgttgatgcgcttcagagaagaatatggttccaagtgtatggtaactagatgcaaaaataattataaaacagt

SEQ ID NO: 40596 - DNA, 201 bp, Bos taurus
agatggcctgaaagtaatgggtctcttacagatgtgggggatggctgtggctcactgcagaggcaaagacactggtggaaacagttctgggaggtcctcaytggcctcttgaaggttaccactttcttaccaacacttggcaccagtgttggtgcctgtacactgaaactgttggtttcagcctgtagtttccagtgctgg

SEQ ID NO: 40597 - DNA, 201 bp, Bos taurus
ttggatggactgaggcttggagagctgcagtggggagggtagctggaccaacttctgcacttggctttgttctcattcttctccctacgaggtaggctctrgtttttccagggctccaggggaaagggatgaggatgaaaagatttacttactggtgtggttgcccctgggtttccctggtagctcagctgataaagaatc

SEQ ID NO: 40598 - DNA, 201 bp, Bos taurus
gaaaagccacatgtgtgccatttaacaaatatgaaattgaactattaatatttataaaaattcaaaagtaggatctggagtactgcttctaaacagtagtrcagattatatattccatactgggtccaactaaactgtatttagacatgtctgaaggtgaaacactcttgacaatgtcaagcaaaatggaagaaagtgggt

SEQ ID NO: 40599 - DNA, 201 bp, Bos taurus
gcaactagtcaaacaataaactgtcaatttacttatccaggacagtctctcagtacacttccagtcattttgccagtatatgtgatctagaatagcagatktcaactgtgcatgtttacttatacacgatttttttttcaacaacaaataccctggttgcaatggaacacacaggtgctcgtggcagtggggcagccacag

SEQ ID NO: 40600 - DNA, 201 bp, Bos taurus
aatacaactctttcagaacctagtggtcaaaagtaagctaaggttatagaagaatttaataatacagtaaataagcttgatttaatagctacttaaatcartagatgaattagtgtatactagtttttggaagccaattgtgagtatctcatcccatctccatattcagtgttgtcacattagtaactagaaatagatcat

SEQ ID NO: 40601 - DNA, 201 bp, Bos taurus
cctcccctgttagccttctctgctggtttctcctatagagctcccgttcccaagctttactggttgtgttctctttgggctgtcatcctggagacaacccwctctccctggggaccattcgctgtcagcttgtcattatcagctttctaatcatttcttctcatgttctctcactttcttctttcattttgcttttatgct

SEQ ID NO: 40602 - DNA, 201 bp, Bos taurus
ggagagtgttttcagtcactcctaagatacaacacaaacttgctgctagggtggctcctagaagcctggagaacgtgtggcccttgctggatggtggacaygcagacacaggggaagcgtgtaaggcagaaggaatgggcttgcagggatgggcgtatcagtgaggccagaagacacgtcagaagacacagtatctatcaa

SEQ ID NO: 40603 - DNA, 201 bp, Bos taurus
ttaaaatattctaaaggaaaaaaggaaggggaatataagaaataagataggcaaaaatgttgataatcattgaagctaagtgatgaatgcatagttcattmaacaattctatttttgtgtatgtggaaatttccaaaataaaatatttatttaaagataaataaatgtttccagactttccatcttgtctttccatcctta

SEQ ID NO: 40604 - DNA, 201 bp, Bos taurus
agaaaaaagctttcctaagatttgaataggaattatgatactgcctgaaaattacctagtttggtcacagcacctaagtcctaacaactccttgagccatractgaagaaggcaaagtatgttccattcaggagccactgaaggatccaggtaattaaatcgaaatcacacagtagtgaaattcaaaaggcaaccctactg

SEQ ID NO: 40605 - DNA, 201 bp, Bos taurus
ctctctgttactgcctttcttctgtttcttctcggggcctccccttaagagcctagcttgaaaattacacatactgaataatgttttttctctttgcattycctaattctctgggacaccttctatctccaggaaaaaagtcctgaggtacagctgataaacccggagaaggcaatggcaccccactccggtactcttgcc

SEQ ID NO: 40606 - DNA, 201 bp, Bos taurus
tcacaccttcttgcctcctgagattgcaggaaggcccttggaattacctgtaaattttaattcctgaaaaaatttgtcctgggttctgaagcagatgggtrtgcattggcctggaagcttaaggatttcagtgggagatgtagttcttggcctcagtttcttcatctgttgaatgaagatggtctagttgacctacatgac

SEQ ID NO: 40607 - DNA, 201 bp, Bos taurus
gtttgtcatggccttgcctggtggctcagtggaaaaactccacctgccaagcaagagatgtgggtttgaatctgggaaatcccatggatagagggacctcrcaggccacagtctatgggaacatgaagagctggacacgacttggcgactaaacaaaaacatagatgtgccatagctttccttccgaggagcaagcgtctt

SEQ ID NO: 40608 - DNA, 201 bp, Bos taurus
gtgcttgttggtggactggagatgtctaatagctgttggaattaaatatttagaatttatagaggtctagctagagatacagattgagaatagtcagtgarcgtgtgtttgaagtcaattgacttgaaattgccctagagagctagaagaaaaaattgaaggatggagatagaaggaaaaagaatccagaaggatttctca

SEQ ID NO: 40609 - DNA, 201 bp, Bos taurus
gatctagaggtcaggattgcagtacttctgtccaggtgttggggaggggagtttggaaaccccaggtttagacaggccagtgtatttctttcttttttttktttttgttgccattattattattatttttttaattggaggataactgctttccagtgttgtgttggtttctactgtacaataaggtgagtcaattataaa

SEQ ID NO: 40610 - DNA, 201 bp, Bos taurus
ctgtcttagcatttcctcttctttgcggcctcgtttccccacccccaatctgtgactattaaccgcactgccagtcaggacttactccagggctgtccatkcagaaagctggcctttccaagctcagatgccctgaataggcttcaggtcacaccatgcttctacttagctttttcagggcttggaatcttgaaagtgttg

SEQ ID NO: 40611 - DNA, 201 bp, Bos taurus
gccctgtgcctggcatgatagtgataagcgatgatggctattgtctcttcctgagagtgcctgagtctggagcggtttggaagaggactcacttgccaagygagatcctacagggccttgcaagggcattctgatgacactgtggtgaggatgccacactagcataggcaggggataaagagaactttcagctaaaaggga

SEQ ID NO: 40612 - DNA, 201 bp, Bos taurus
aagctagaaaatcacatacttgcttcaaagctgagatgtacagcataacattcaaaagctaaaatgtttttttgatctaagagagtagggccaaaacctgycaaaatgtatttatgtaccttaagggggaaaaaaaaagcatcggtcacaagaggcattggttagcaatgctacatgggagaaaggaaggatcttgtgaaa

SEQ ID NO: 40613 - DNA, 201 bp, Bos taurus
gggcgtgaccgcgggggaggcgggatcagtgggagatcgcgttggctgggattcaatctctgcctaccttggagccagtcgccgttccctggcgctcactktgtgcctgtccccgggaggccgtcgccgattggatccccgctttcagctctgccgtgagtgttatcatcctcttttagacaagcgcagggagttctagtg

SEQ ID NO: 40614 - DNA, 201 bp, Bos taurus
cttgcacaaaaagttgtacataggtcactttttgtaagaggcaaacagcaaagttactgtacttcaatctctcttggcatccactcttgtaccacttgtgygctttggagggaccgtagggctcaaagaaaaagaactactggcccagagaatcaagttaaacttcccagcaaagcttacatggtttgttgttacctgtcc

SEQ ID NO: 40615 - DNA, 201 bp, Bos taurus
ctcactagccatcccgcggccccagccagcctctcgtccttacactttcccaggaagtcacacaccaggcagtccacatgatcaacaagctgccaggacaygggccagcctctccatgaagttccctgaagcccctgaacttggggagatctcctccttctcacttaccatgtcctgacagccctctgcaaagaagtcccc

SEQ ID NO: 40616 - DNA, 201 bp, Bos taurus
tattccttattatagcgtaatatcttaaatgacacagatttaattggaaaagtcactgcataagtgtatttttatctactctaggaatatgaagcacggayagggagagcctgtaaaccaccacctcagtcttcaagacgaaagaattttgaatttgagccactttctaccactgccctgattcttgaggatcgaccatcg

SEQ ID NO: 40617 - DNA, 201 bp, Bos taurus
aaggttaaccattggcatagtctaagtatattataaattattgttccatgatggcatgttaaaggtttaattacttttaaaatgtatgctaattttttctraacaagacttaaagcagcagataagcacaaaggattttaactaaaatatacaaagttaaatatagttatttttataaaaatcaagtaatttcatttcatt

SEQ ID NO: 40618 - DNA, 201 bp, Bos taurus
atcactctttatgtctttaactccatcgtatcctgattgctgaagccatctccccttcgaaacccctggatcctgctgggtctggcccccagtatggcagycttttccacagtgactacagtagtcatgttcccacgagcaatgtacaggggtcctgttgacccacatagtggccaatatgtattttataattttttgtaa

SEQ ID NO: 40619 - DNA, 201 bp, Bos taurus
caagctgtgaggtgaaagtgtaaagagcacagtcctgcccagagcttagtatcatggaatgttcatctggggctgatggttgagccctttaatgatagacmagaaaatgcatgcccagaatatagaactacagttcagtcctattgacactgttcagtggttttccccaccaatttccagaaactacttttgtgacttctc

SEQ ID NO: 40620 - DNA, 201 bp, Bos taurus
cttacttggcctgattcttgcttcctacacattatatatatgtctgcacctggcttctgccccaacataagacctgtagctgactcatgctgctgagtttrtgtccaccactttctctggccaccaccaatgcctgtcctgttccctagccactgggcctttagacaccactgaagatgcctattatccttacagccactg

SEQ ID NO: 40621 - DNA, 201 bp, Bos taurus
ggaacatccaaaataatgaactactattctattttgttaataatattcgtgataaacattttaaaattaagcatgtgaaaatatttatttaatatgctaartttgaacaaaagggtagagaataatctatgcaggatgagccttgttttcttcttctgccagatcttccacccattcctagataatatgcaccaaaagtcc

SEQ ID NO: 40622 - DNA, 201 bp, Bos taurus
ataaaagatgtggctctgctcccctctccaagcacattgcttggtacccactgctcactccaggcagaaaagccttcatggggtttctaggacacaccagmctcggggcctttgcacatcctgctccctctgcctggaatattcgctccccacacagccccatggcctccatgcttcactcatgtctctgctcggatgtcc

SEQ ID NO: 40623 - DNA, 201 bp, Bos taurus
gtctctgcctggcttagttgtgttcaaaataagtacaagcaccttgaaggcaatgataacattgtcatctcctgctcaccgagggccaactaggtgtcacrtgtcacactgggggcttccctgaggctgtttcatttaatctgcccgtggcggctcagggagagggccatttatcttcactttacataggaggaaatcaca

SEQ ID NO: 40624 - DNA, 201 bp, Bos taurus
tggggctgcaggtatgttctttctctttaaattatcccttagggttctctcttccccagaggacctccagcttgggagctggatcttcccaatgtcaccayctttcctgagaccagaatggcaagctgcagaggggcaagagttaggttcaggaatacagagtcaaaaagctaccatcagcctacagtgctggaggccact

SEQ ID NO: 40625 - DNA, 201 bp, Bos taurus
aaaaaggagcagggtgggtgggaatgtaatatgatctgtctctaacaaggtttcatgtggccgagggactcagagcatcacagaatttcagggctggaaargaccacaatttccaaatgttatgagtcttgaagtccagaccaatccatcaagatgagagaatactacaaccagtcacacacgctccctgaaacaaagaat

SEQ ID NO: 40626 - DNA, 201 bp, Bos taurus
gatagtttcacacacaagttgaaggatactgactctaattataggtgctggaattgtggtttgacattggaggcctcatagggccatgggtgtttaaatcygattgtgagttatgtgggttaaactccctactatgttactggggtcagtggtacctgaggccagggttggagcagtaaagtcccagcagtctcgtggatt

SEQ ID NO: 40627 - DNA, 201 bp, Bos taurus
acatattaaacagacattcaatatgcacccattagtgcaagttaacccctttaattttcagggtaaactgaatatttattatgcatgttttatgtgtgagratactggctcagagaggttaagtttcttacccaaggacaaaagttgctagatgacaaagccagactcaaacccagggccagcctctttccttatggcctc

SEQ ID NO: 40628 - DNA, 201 bp, Bos taurus
tcccagggacgggggagcctggtgggatttgaagaagaagaagaaagaaacaagaaatctagaccaggctttactgggggccctgcagcagcacaggggaycaggaacaaacaacaaattcccttacttgctcactccctgagtggggggtggggggggcgtgagcttgttccttctgtggtgtgagggtcggggtgtgtc

SEQ ID NO: 40629 - DNA, 201 bp, Bos taurus
caggtcagaacgtgggccttgagggtgggcttcggaagatgtctgagctcattttttaattctttatttagctcattttccagggaggccctggccagccygaatcccctaagtctgaagtgcttgtcccagatggggcatgaagtcttcacctcttcccttccctgctgtgcatgcatgcagggctttgtggtggggcca

SEQ ID NO: 40630 - DNA, 201 bp, Bos taurus
ctaattatttccccttcacataattattttttcctacattaaacaaaaatatttttttctttcaattactgactgaaaaagcatattagcaacataacccratgagtacgtgtaatttttgtattatgatgacattttaatcattttcagtgtgaactcgttcccctccccgacaaaaacagattagcactaaaggcatat

SEQ ID NO: 40631 - DNA, 201 bp, Bos taurus
aaacagaaagagactcacagacttaggaaacaaacttatagttgcccgggggaagagacagctaaggacttcgggaaggtcatgtacacactgctctattyaaaatggatgactaataaagacccactgtatggcacatggaagtcttgctcagtgttacgtgccagcctggatgggaggggtgtttgggagagaagagat

SEQ ID NO: 40632 - DNA, 201 bp, Bos taurus
aagctttctttttagataactgaccttaaaaaatacaggcatgtaaaatggtggagtccttttccctaagacttgatggcatttaaaataataagcatagragagtggcatttgaatcaatgagttgcatcttgtcagctcttattagcttattgcttgaaatgtcagtaagccattggtagcagacatggctgtagctgt

SEQ ID NO: 40633 - DNA, 201 bp, Bos taurus
ggccggagaggaggcccttgcaggacccccggtggaagatggaggtacaggctctggagtctgtctcgcctcaaaccaaggctttaggcccaattcaatgrcttttcaaagtagcacaatgagggaagggagaggcgggaataggagggggcaaggaatggaggaagtgaggggtgggagttgacgggctggaggggaggg

SEQ ID NO: 40634 - DNA, 201 bp, Bos taurus
tcagaattaaggctaaatgcagtcttaagggtggggccctagtctgacaggactggtatcttcataagaagagacacagggatatccctgtgcacacacayaggaaaggccacttgaggacacagcaagaaggtggccaggagcagaggcctccccaaaccaaccccgatggcatcctggccttagacttctagcccccag

SEQ ID NO: 40635 - DNA, 201 bp, Bos taurus
caatcgctaactcttaatgctttaagtagggtggtgggggtaggtcgcctgcgccatctagtggccgagatggtgattatcagcacttgtacctggacttyctcgtcaatggaatagggtagtgagatgtggaggctattgagttcttgaaatgtggtttatctgaattgagatgtgccgtagtgttcttgcctggagaat

SEQ ID NO: 40636 - DNA, 201 bp, Bos taurus
tagagcccacaggccaggaggtagagcccggctcagctctcaggcaccttcacattcttccctacccaggtcgttccctctcagttttaccactgtctgtytggttcccagttccagtcagggcctttcttatttagccatctttacagccctctcaggatcccaccttgctccatctctttatcttctcactatccaaat

SEQ ID NO: 40637 - DNA, 201 bp, Bos taurus
cacacgcctcacctggccaaaccccagtgtcccccaagtgaacactggtgcacaaacccaaccattgctcatgcctggggcagacactttctcggtatcakgagttgctttccaagggccacgtgatggaagggctgctgctaattcagcattccaaccagctctgcttgcctcagacacttttttttttcaccagctaga

SEQ ID NO: 40638 - DNA, 201 bp, Bos taurus
aatttctcagacccccaaatccagactttccacatcagaaactctgaggatgaaactcaggaaaatgtgtttttaaataggcctccagatgattctgatgmccattcaagcttgagaatcactggcttggactgtcacaatggtctataatgatcgcctgcctccaagcaacccttcagtctggccaccacgactgccttc

SEQ ID NO: 40639 - DNA, 201 bp, Bos taurus
ctgctggtggttttggttccagactcagggagaaagatgctctgaagtaattaggctgacaggccaagatgcagaggccgggatgagaggcagaaggccakggagagtgatcctagccatctttggactttggctcctgtcaatcctgacgtccccacccctgcccctgtgtctgctttcttgaggatcagatggccagat

SEQ ID NO: 40640 - DNA, 201 bp, Bos taurus
caaactctctcggccccatctctctcagcctcccccagccatggctatggtgccgagctccatgcaggctccagccagctgcacgcagtgcaacctgaccrcatctcacctcaggcctgtaagatgcacttcttcttcatgtcttccctggggcctccctgacaccaggacagggtacccatgggactcacttggcaccca

SEQ ID NO: 40641 - DNA, 201 bp, Bos taurus
acagcatactgaagatcctaacaagttaaaaaaaaaatagacaaaacccacaaagaaaatcaaaagtacatcgctattagaaagaaagaaaccaattgatyataatttgtaagcaatacaatgatctatagaaaagctcaatggctcagtgggtaaagaatctgcctgcagtgcaggagacacatgggttcaatccttggg

SEQ ID NO: 40642 - DNA, 201 bp, Bos taurus
ctggaaaatgagggaagagagtggtattctaaagaaaatgatacaaaaccaaaaggtgcaaaggtgaaaaagtatggcctcttctaagatggacatatatmtttttgatgtactgagggcaggttgtgcaagggtatgtagctgctgactagctgcaaagaaggcaggcactggaccctaaaggccaggggtgcatgtgaa

SEQ ID NO: 40643 - DNA, 201 bp, Bos taurus
ccaaaacaaccaagaggatgggaacacagccccacccagcagtccataggctgcctaaagtcttcctgaaagtagagctgcctctaagcacaccccttggyatggccctgatcaccagagggacaaatccagctctagccaccagtgggcaggcaccagtccctcccaccataaagcctccacaagcctctagactatcct

SEQ ID NO: 40644 - DNA, 201 bp, Bos taurus
aatataatatatataatatatatatataataatataataaataataatataaacttaaggtctattgtgtcttccatcaatcagaagctacagtaataatmcttgctgagaaaaccctcaataaagtagtagtacaaaattgaaagagtctgtaattttctacatttgagctatataatcacaatcacatgtcaaaattac

SEQ ID NO: 40645 - DNA, 201 bp, Bos taurus
aaataactgttggagtagaaaaactaggacaactgacatgaatccactcacacagatggttctttacatttgaaaaccagcttttggcaacttggtgtttmgtgtctgtatgtttgccttttattttgcataaatgtatttttactcgagacatactactttcacgtaattgacatgcagagttcaaagaactagactatt

SEQ ID NO: 40646 - DNA, 201 bp, Bos taurus
acaggccccactgagttcaacctttgagtcattccagcccaggcatcataaatgtgagtgaagaatccaggaccagtttcaaagacatgtaaactatacartcacacaaggcccacactcagaagggcctatggttggtttaatctctattattaccaattacatctttgaacttgtgttttataagtgaagtccaaggga

SEQ ID NO: 40647 - DNA, 201 bp, Bos taurus
aggatctctgcctgcagggtattggtgttggcccactggcgagcagccagctcctagtgcagctggctgagggatccagggcatcccaaaacttgtatcarcctgctagtgagtggggccagatcccaagacagctggctgagggacctcaggtgtctcagagctggaggtgaccaactgatgggcatgctgggtcctata

SEQ ID NO: 40648 - DNA, 201 bp, Bos taurus
ttgaatgttcccaagaaattgttcttgaaaatggaaagagagactgactcagaatattcaggaggcctttgaccaaaggcctggagcattgttccagcctyccgcctgtgagcctaaagaaagccctgcctgagaaccaccccacagggggctccactttggccctccccagctccacctcctctctgcggggtgagtagt

SEQ ID NO: 40649 - DNA, 201 bp, Bos taurus
ggcaaccacagtcagattccccacacgctcatctaaaaagaaggacaggtgtcagccctggggctccagcgggggtggggccggggtggctgggctgtaaygcaggagagcactcactgtagagcccgaagtttttggagaaggactgggcacagaagagctcgaacccttcagacacaaaatagcgaatggcccaggcgt

SEQ ID NO: 40650 - DNA, 201 bp, Bos taurus
gccgtagccactcagaggttagtccacctgggctccaggcagggtctgggactggtgagactcaggtgtccctggacagctaggaccaggctctttggtcyccacgagggcctgtccttgtcctggactctgacaactgcagttctcccggcgtgtctgcagcaggacccaggtgttgggctgagtgtggtctgctgcagg

SEQ ID NO: 40651 - DNA, 201 bp, Bos taurus
ccgacgggatcagcaccagtccatggcctggaagctgggacccctcttctagaagcatttctaacagaggaagttacagattgtttacaacaaaaacagtrtttatgtaaatatatggagtaaggaggtagctgcccaaggtagtgggacaacacttaaattgaatagctgtggtaatatttctaagtcagtcacattatt

SEQ ID NO: 40652 - DNA, 201 bp, Bos taurus
gatgtgaagggttactctgcagagggaaaaacacaggtgaaaacggagtcatggttgtgactgcagggaaaccctttgcttggtcgctgcttccagtcctraaactcccatctttgatgctttacaaataagtaaacgaggtctggattatggaatcttgtgatttgaatggagttctggaacactgtctccatcggctgc

SEQ ID NO: 40653 - DNA, 201 bp, Bos taurus
ttttgttgtctctctcttttccccactctgtattttttaggatagcactcgcactgatctttctaagagacaaacttgtttctgaatttaaatataactcmaactatagggaacagaccaacacaaatgggaagcttcaggggaaggagaaagggtgacacctgctggcagaaccactggtggttttcactccaaacagaa

SEQ ID NO: 40654 - DNA, 201 bp, Bos taurus
atgttgggtatgttagttgtattaaatgcattttggacttaggatattttcaaattaccatgggtttgtctggacatcccactgtaagtggagaagatctrtatttcaaaattctcatcagatattgtttctcctttctattacttgtgtgtgcttgttaaaatctatgtaacattagtcaattcagttcagttgttcagt

SEQ ID NO: 40655 - DNA, 201 bp, Bos taurus
aacatacacttctttatcgcacctgcatccctgctggtgggtagtgttccaaggaagcaatgccctctccacactcactgttttggggcaagtatgtgcaygggtgaataattacatagctgtttacttctatttttgtaaactagattcctcaataggtctctacagtttatatgtccgtagatatagtagattactttc

SEQ ID NO: 40656 - DNA, 201 bp, Bos taurus
gttaaccttttttagcgaatttaataaatgataccttccttaaaccagaagtgtggtaagtagggaaatagtctgcaacttaaaatacttgaaaaattacwaacactcacatgaaaagatgcttcgatttaaaaagcaaaggtcatggaaaagaatttgaaaaagaataggtgtatatatatacggctgagtcccttcgct

SEQ ID NO: 40657 - DNA, 201 bp, Bos taurus
ggagagaaagagaatcagagtagtttcaactttttacaaaactacaaacttgggccagtttgaaaatatgaacattccataaagtgaacatgaattctttratttggtaacaagaacaaggtaaatcatatggaaagtcacacgcaaccagtgcagttaggttcaatccgaatggagttaagacagccacacgttcatcct

SEQ ID NO: 40658 - DNA, 201 bp, Bos taurus
aggttgtggcagggcctgggctcaccccatcaggaccccgcagtagctccaagctcctgttaaggaccatcactttctccatcaggtcctgaagggacaargaaaagggcagtcagtcctcatcaacccacaccctgctctcttagctcaggcagctcaaccaaggacttccctgctacagataccaggtgatgatacatg

SEQ ID NO: 40659 - DNA, 201 bp, Bos taurus
gctgtatttgcctttaaatgtgtatttgagaacctgtgtctacacaatgggagcacccatcatggtgtgtaagcctgtgtaagtgtggctgtgtatggccrtgtctgcacatagactgtaagccccacaggggcaagaccaagtgtcctctctatagctccatcacctaagaaagggcctggcacatagtaggtgctcaat

SEQ ID NO: 40660 - DNA, 201 bp, Bos taurus
attggcacctcactcattgctatgccccctgtgttgagtgcagagactggtgaacagaaggcacataggaagcttctttttcttctttcacctttccttcytacacaggaaatacagagaagaaagacaaaaataatgcccatataagttagacaaccccagttgctatttgaatgaccattcaccagacaactctttctg

SEQ ID NO: 40661 - DNA, 201 bp, Bos taurus
ttttgggggccagcggacgtctctctctgaccattgacctcttagcaaaggaaggtttggcgcaaaggagcctgaaggaaggttggggagaaaaaaaccgygctcgaggaaggcctgggctctccggagagggagtaccgcactggggagacaaggttgggggtagctgggtgtgttctccgaacgggccgccaggtggcg

SEQ ID NO: 40662 - DNA, 201 bp, Bos taurus
ccatttctctctcttgtccccccgggcctgtgcagcccgtggctcaatgccctcctctcagccagtcccctgctcactttcctggcctgactgatggtgcragatcttcttgtgtatgctttgggggaccctcttcaagtggagggattggggcttccagacaggtctacactggagcaggggagacgtttctctgcagtg

SEQ ID NO: 40663 - DNA, 201 bp, Bos taurus
cacatgtactttctcgtgggcatgtcccagggtgagcacacggccctctacatgcatggatgcatattgagggtgtgcgatatgcagtgtgtgtctctacractgtgagtgcaggccggtctacctgtgtctggggcaggaactcttggggcctcctttccctcccccactggttctccatctccacttctctggtcaaag

SEQ ID NO: 40664 - DNA, 201 bp, Bos taurus
accccagtcgcgcgctctcccggggcccctcccacgcgctcgggaccccaggcgacgcgtcccaggggtgggggcacactccccagggtactggggccctyggcgctgaaggacggcgtaagactccccattctcggtcgggaattcgttgggaccgaatctcggtaaatcccgcgtcggccgagggccgcggcgaggaca

SEQ ID NO: 40665 - DNA, 201 bp, Bos taurus
gggcagctggctgtttcccattcaatgttgctgttctaaaatgaaaatatgactggcttgctgtcaaagcagcagcacataattacagcctaatatgattkaaagggataattcagaatttagaataaaatataaagaaatgcaaacactcaggtgtgtctggatatctccctccattactcatctagtcctgccctgttc

SEQ ID NO: 40666 - DNA, 201 bp, Bos taurus
ctttcccaatcctgccctgtcttcctccaacaggcttaggttggcttatcaagaagtctgggaagagggagttcccttgtggcctcctggttgggattccrggcgccccaggttcaagccctggttggggaactgagatcctgcaagccacctggtggggccaaaaaaaaagccttgaaacagtatgatcaaaacaaagtc

SEQ ID NO: 40667 - DNA, 201 bp, Bos taurus
ggaagctttacttgttgaggtaggccaagtgcttggatatagctaggagctgaggaaaggaaatttagccaggcacatggaacatggtatctgtgggcaaytgaagcagatctggggacccagggaagtttataagggcaggatataatttcagagggagagaatagtgacaaggaatctgggtacagatagtctggggag

SEQ ID NO: 40668 - DNA, 201 bp, Bos taurus
tcctgattaataggtctagtttcaaggtggaaaggccttcatgacctttgagtatagtgttcagcttgagacagtccagctggtcttgcttggaccatcaratcctagttccctttggcctttcttagaggccactagggcagttccaggatgtgagagaaaactatagaaggaaagaggaaaacttgtagagaaatatgt

SEQ ID NO: 40669 - DNA, 201 bp, Bos taurus
tttaactaaattttgttctcctcagaatggcccaagtagagactggtgggagcaggacagagaggaacactccactcaaaccactgggccctttgaacagytgacccttttcttattcatctccaaccaccccaccccatgcctgccagcttgcaaaatactgtttgtttttaatttttaagtataaataatcccagggcc

SEQ ID NO: 40670 - DNA, 201 bp, Bos taurus
ctatcttcagagactgggcctctgggatttctttttacaaactgatgagagtaaaaattctgttggaaaccacaaggctcactctgccaggacagagtctrggccactctcagacccttccattttcaacaactatggggccaggcgtctgagaaataagcaatctaacaatactttcccagcacttatctgacttgaata

SEQ ID NO: 40671 - DNA, 201 bp, Bos taurus
cacgtgcatttacattgatgtgataccatcaccaccatccatctacagaattcttttcattttacaaaataaaagctctgcacctatttttttgagagggrccaacatagctccccactctccacagcacgcactttgacggactccaccacagtcaagggcagctgctggcccagccgagggcccttcttcaggcactta

SEQ ID NO: 40672 - DNA, 201 bp, Bos taurus
ggaagccccggccttgattctcttctgggtttaggctgttccaggcctgtgaatgtcagttcgtcagccactaactatatctactctcggccttgggttcrtttgacaaatatttgctgaaggcctcctaggcccagcctccctgctgcatgggccccggcatctctttgagtttctgccaacatgctattagcaaggaca

SEQ ID NO: 40673 - DNA, 201 bp, Bos taurus
ccaggtatttctgagtccactgaactcagaattgagtccctgccactcaggtcttggtttctgaggaggaaccaaggaccaggctgtggtagggcccagtyatcttacaagacataaagcacaaagacaagaatatgctccaaagtcccacaggactctattccccgtcccctttttagaggcctgtctcaggtaatattt

SEQ ID NO: 40674 - DNA, 201 bp, Bos taurus
tttggtgggtttgaagtttagcttccacacttcactgctgtgtgggcctgagcatgtgtcttagcctctctgagtaagagggtctcgttagctgcaaagtrtggtttataatgggagcttcccattaaatgtgatgacacaaggtgggggctggcacatggtgagtgcccaagtggaccttagctatttggacactcagga

SEQ ID NO: 40675 - DNA, 201 bp, Bos taurus
gaggagaaacctgagagggagaaccctacctaccaacaaccagaggccttttctggactcagtgacagagacggaacagagagggggactcctggcactgktgagtcccccgttcccacctgaggccccagtgctgccccacctcctgggaaacccccaacatccttacctgaactgcctatttgagattaagctacctgc

SEQ ID NO: 40676 - DNA, 201 bp, Bos taurus
tcctggattttctcctatttctgtgactgtgcctcttcagactctacttcttcctcctgtcttttgcagacattttcctctctggctctcttccctgacaycctctctttcctttccctcaccccctacccattcccccacctcatgctccatgctcccactatcctctctgcagtagtaactctaacttatttcgtcttc

SEQ ID NO: 40677 - DNA, 201 bp, Bos taurus
tattgccttttaaattttcaagtacctccccgtcccccactcccccgccaccaatgtctttggctagctctctgtcaagagtttgttttcttgatggttcrtctatctgtgttgatttgtcccatttgggaatgagaacttttgttttaatgcaaaaatttgataatgttgagtggccaacacatatgaagttcaaaaagc

SEQ ID NO: 40678 - DNA, 201 bp, Bos taurus
gccgcccgggggctccagggccacctgaactttgaacacattaaagcccagtgaagctcatcggtgacaaaaaaaggaagcaattccccaaatagctcagygttggggtggcctggcgaggggacctgatgatcacccctgggacgttctgcccacacagtgctggatgccaagcgctgatgtgaaattaccagtgcatct

SEQ ID NO: 40679 - DNA, 201 bp, Bos taurus
gtttccacccagttagtgctgtgaaaagaaggtctttccgtcccttaaccattaccatggctctctgtccaagccagctggacctggcagggccaccctgkagcctgtgctgatgccagtccacctgctggaaactattcctaaattcctaagtcagacaaggcagatctagccctttggggtcccatccccctcttggcc

SEQ ID NO: 40680 - DNA, 201 bp, Bos taurus
aaaagggaaaagcatgtgtaaaggcctggaaggaatagaataattagacacgggtgaagatggtttgctgttgccttcatgtaagtaagatggtgggaackgtcagtagataagacgactgaggccctttataaatgggcactgtatgatatattattaaggaaaataaacatttactgaacacttacattatcctaggtt

SEQ ID NO: 40681 - DNA, 201 bp, Bos taurus
ttctttggtcacactcacttctttctgatctgagtcctctcccaggtatcctggggcttgttagtgggttttctgcatctgctttcagttttcttccctgrtaattcccttctcagagcctttggaaggctttgattggtgagagaagcaagggtttggcgggctttctttcagtcttggttttctttgctaggcacagga

SEQ ID NO: 40682 - DNA, 201 bp, Bos taurus
ctggctgttatcctcattaaaattcgttttcaaaggctccggtgagcggcctgctaaagataaactatcaggagagaggccttcaaagaaagtgctttaakgatgcaattatcttcaatcaactcagaacatctttattgcattagaaaagggcaatttatctcggaatgcagaaagaggtggtctagcctcagacacagg

SEQ ID NO: 40683 - DNA, 201 bp, Bos taurus
tggtgggtgctgagccttttctgggcacccagaggaaagcccacccaccaggccagaccccaggagagaccaagcattccttgctggcccctcggaccccyttcaccactgcaaggtcacaggtcctcacacacgtgcacacgtgctcatattcagcccccaggcctcccctttgttcctaccacccaagggccctggctc

SEQ ID NO: 40684 - DNA, 201 bp, Bos taurus
tggtacccagcgtatgcgttagcacaactgtaggccattcccaccgtcacagaatgtgctattggacagtatcagtgagaaggaatgttggctctggaaayggaaggcctgggttggaacctggccttgttgtttagcagctgggaatctgtgtgtgtccttgagcacatttaaaaaatatctctctgcctttcttccttt

SEQ ID NO: 40685 - DNA, 201 bp, Bos taurus
atgaactggacctcgatagatagagtcagggtgagaaaggggaagcatacaattgtggtgggagcagggacaagaaggggcctatgaatggtgctcagggyaggttctgatgtgattctaccagctgttcagggagagatgactcctgccccaggccatctcttggggcagtgagtaagtgactcacatctaacccttgct

SEQ ID NO: 40686 - DNA, 201 bp, Bos taurus
tctttgcttttctatggcaggaacaagttttttctctctctctcacacacacatacacacacacattcaattataagtaccatctccaagtgttcgacaaycggctgaaggcttttgcctgttgtcagtacaggtttcaaactctccccagggatgccctttactgagcaaagcatgaggaatgaagaatgactagctgcc

SEQ ID NO: 40687 - DNA, 201 bp, Bos taurus
ttgaatctcaatttacatttccttaagtaactcacatgactacaaaatgtcatgcttttgtgcatcctgttctttcctggcaaactcctattcaccctgtraaacctgaatcccagaggcacagaggaaactggaagctaaattcctctcccactcatgtggagcattcttgactcaggtgtggatggtaaatgagggcag

SEQ ID NO: 40688 - DNA, 201 bp, Bos taurus
ctatcccagtagccttgtatgttttgtccagtttgtatggtttgattcgctttctcttagatgtcaagtaaagtacttggttggcacataattaaaagatmaataattctcctaaagtgaaacaagaatgttctttttcagttctgacgttagctgatgtttctccaagagtgatttttggttggtactttccaggtacaa

SEQ ID NO: 40689 - DNA, 201 bp, Bos taurus
ttcataaatggccaagaaacttcacccataacaatgtgtacattttctgttttattccttttaattttcttctcatggttttggaaatttacttgcttacratttatgtattccctggtggctcagatggtaaagaatcaaccttcatagagttgaatgcagtacatatccagattgataataatctgggattccctggtg

SEQ ID NO: 40690 - DNA, 201 bp, Bos taurus
taaaggctgtaggtattgccttaaagtattgaagggtaaaggcaattataggcagagactgtaacatgcaaatatgttactctactggattctaccaaggraagttcacatgtaaaatcagcaaataacctgcaatttaggtaaaatgtttaagtatattatcactaaatctgaattttagagagaagaatcagtctatat

SEQ ID NO: 40691 - DNA, 201 bp, Bos taurus
actatttatcatagttaagacatggaagcaacttaagtagccatcaacagacaaatggataacgaaaaagcatatggtatattgcttagccataaaaaagratggaattatgccacttgcagaaagtggatggacctagaaaatattatgcttagtgaagtaatttagacaaaaaagataaacactatatgatatcactta

SEQ ID NO: 40692 - DNA, 201 bp, Bos taurus
tccatctttttcccttcttttttccttctctcccccttcctctcctccttctaccccagtactgcttgtctctggtctttattctcagttcaaattctcartagataatctaattaaccaacctatgaatggatgtcaatcccaagtcagctgtcccttcacattccaatcaacagtgaccactgagaataggataatcta

SEQ ID NO: 40693 - DNA, 201 bp, Bos taurus
gctgaaatagaggagctgattcaggccataccttgggcaaagcatatttggggagcttcatctgggcaaacgcattccttcggtaggacacgtagtaatgyggccgtccccctgatgtcagctgcaacgtaagcacaaaggtggtaaaaggagtcactaccagttacaggtcacagaagaatagtccctgcccggaagggg

SEQ ID NO: 40694 - DNA, 201 bp, Bos taurus
ggacatgggcatccacagggtggggagaagaagctggctgtagaggatgggagaaaagtgattccttctgctcatggtcggggcagcaggtaggtctgcaragctgcccaaggaaagggccttgccagtctcaataagccaagccagagggtttctcctccccagcaaccaggcagtctgagcccggggagtgttcacatt

SEQ ID NO: 40695 - DNA, 201 bp, Bos taurus
aacagcctattcatgtcactctctgcttttcccctggaggaggagtgggaaggaagagacttccagctagtgggaattatccacagggttggccgaaagtyagcatcttcaggtcagcttctgtcagcctgaatccctggagttctccaggaagtactagctgcagccaaccccacacagaagctgcctcaaagccctctg

SEQ ID NO: 40696 - DNA, 201 bp, Bos taurus
gccatgtcctcttccaggagatcttcccgacccagggatggaacctgggtctcctgcactgcagcagattctttaccactaagtcaccagggaagctccayagattcatggcaacactggcaaatgactgatttattttgtgggtcctgtctaagcacttgtcttcagagtctttcatttatagtattttatactgttctt

SEQ ID NO: 40697 - DNA, 201 bp, Bos taurus
gaactttgacataatcatctgtctcctgtcatatcaactcaattgggaagccattcctgatctctagccattttccaacatgtatttagtattttcatgcytttcagctatttgcttcattgttattctagttagactcaaggatgttaaagaggttataagccacttgccagtttctataagttggcagtatttgcatga

SEQ ID NO: 40698 - DNA, 201 bp, Bos taurus
tgggggtactccaggagttggtgatgtacagggaggcctggcctgctgcggttcatggggttgcaaagagttggacacgactgagtgactgaactgaactkaactgagagagatgttaaggcctaaggaggtaactttccaggtcacataaaggcacatttagaggtcatgacatgagaaataatttagaatgttcaataa

SEQ ID NO: 40699 - DNA, 201 bp, Bos taurus
cagtgctaaggctggattcagcatctgaatgtgtcccatgtatttcatctcttttctttttgacagtgtatatgctgcttttattcacctctgtattcacrtggaacatgaattaatactgtccgaagactttgaagcttgaaatagttgtaagagatgatgacccgtggagtagtgaagcctttctttccctctgctctt

SEQ ID NO: 40700 - DNA, 201 bp, Bos taurus
ggatccacaggcatctggaaattcaaaaatatcagggcatactcacaaacagcctccaaaatatcaccagctctgcaaaacaggtgtaaaatgaaaacttkctcctgctggataagataatcttctcattagctccaagccaagagcaaaagtgaaacacctcattaaaaattctcacttttgtatgtcttctaacccatg

SEQ ID NO: 40701 - DNA, 201 bp, Bos taurus
ttgtctagtttgtatgagtcaaacccattctatgctgagtcattcaataaattcctttctttgtactttataatggaagataaccaagtaataagaagtgycattatttctgaaaactaaagctacatagaagattgggtagggaaaaggaatgctgagatcagtgtgcctccttaaatatttaatcagtttaaaacagtt

SEQ ID NO: 40702 - DNA, 201 bp, Bos taurus
aggatgctgcattttcctttgattatcacaaatggtttttaaattttttaggctatattgaaagaagttggattatggcatctataaagcttttggagaayatttttattttattttctttctgtgtgccacaaaatctatcaatgagaattctaaaggtcaaagaatactttttctacatagataggtttatcgtactat

SEQ ID NO: 40703 - DNA, 201 bp, Bos taurus
atctttttccaaggatgaagataaagattttataatgctagattgcttatgttaatgcttttgtgacctctacacaactggaagcatctattatctaggaragacatagaaagagaggatttgtttgttttttcaagtgtatttgtgacaatgatactttgactcttgtgtcttttgtaaaattcctcaaagaattttatg

SEQ ID NO: 40704 - DNA, 201 bp, Bos taurus
gggtttctgtcttccaaattgtaattttaacttcaacttctgggataaggacatgaaaatgaaattggagcaagggaaagacaccaggccaggagacatgytgatcccaccatatttcttttctttctttcttaatagctacattatcctttttgcttctctgatctcccaatttacttcacagaattacactaggtggtt

SEQ ID NO: 40705 - DNA, 201 bp, Bos taurus
gtttccttcttctagagtttgggctaggcttagtaacttgcttctaataagtaaagcatggaaagagaaaaattgtaactttacagtgagatacccagcakgtacaccatttgccaaatgacaaagggcaataacactcatgttaagtaatgctgatgtgagatattccctgatgtgatatacgtagggcacttcacttat

SEQ ID NO: 40706 - DNA, 201 bp, Bos taurus
gcttctcttgcttcccagatctgtgtgtgcttcccaggttagaggtgacaaaggacagccctgtggcagatctggcccctaacctgtatttataaataaarctttattggaacacagccatccagatgatagctgcttccaggctacaacagcagagttgaataattgtgacagagaccatctggcccacagagcctaaaa

SEQ ID NO: 40707 - DNA, 201 bp, Bos taurus
ctgatcctatccttggttttctctccagagcatgctttagtatctgtagtaatatggatatacagaattttccaaaccacttagttctggttcctttttargtaattgtccctccatctctttcctctcacattttactattagtagcaagcagacactaggctgtaccacacactgcttataaacatcaaagttcattgt

SEQ ID NO: 40708 - DNA, 201 bp, Bos taurus
caagtaaaaactggagaaatggccatagtgataagggaagaatgagattaattccagcaactgggtaccatgaagaatttagagtattattcctagcctcrtgttatgagttgttgactaaggccttaagcatattaaatacttgtaagtatgaaacaagttaaatatatttaaggattaacctgagtaattctaatgaca

SEQ ID NO: 40709 - DNA, 201 bp, Bos taurus
tagaagaggcatataaaaggaatcgtacagatctttcttctctaaaacacaagataggtccttagaagttgctcaagttgcttcagcttttattatacatrttttctgaaaaaagcccaaaaggcttatagtaaaagatggtgaagaataccaagagaaaatgtaattctggaacttagtcctttaatatctcataatgaa

SEQ ID NO: 40710 - DNA, 201 bp, Bos taurus
tatccagttaaaattgtcttagttggattcactgtcactctatgacagccatcttcctttcctcctgttgggtttttaatatttatcttcattaactttaycctgaatgcacacacaaggcattcttggttgaagacagactttttattaattacttcacagtaagtaatgtgtactgcctctcccttccccacttcttac

SEQ ID NO: 40711 - DNA, 201 bp, Bos taurus
cccttagaggaatctcatcaggattccaagattctagtgacacagagtttggaaaaggctcccatgtattagggattgcaaccccttttccttctataagraggcctaaattttacttacctttaattctgatcattctgagtccaatgtcagtattctagcattaggaatagttattgactgtacatgtgaaaactcagc

SEQ ID NO: 40712 - DNA, 201 bp, Bos taurus
tccatcttctgccatctgtcttggccacttcagtgcacggtgcagagatggttgctgaacacttgaaaacaatctttctctgcattcaagtcacacatgtrgaaatcatcaggcccacatctcctgatatcatttagtcctaatgctgaccgccaactgaataggtctgcatttcaaggcctggcttcttgttgcagatct

SEQ ID NO: 40713 - DNA, 201 bp, Bos taurus
cacccctgccattgtggagatgtgaaattgatgcactgacaatttctctaagctttcttcacctatagggcataagtgatcatagtacccacctcctcgastggtgggaatattaaaaaaaacactaggcttgaacaaggggcctgggacacaccatgtgctttgtaaacagtagttatagatgtgtggatgtccatgctc

SEQ ID NO: 40714 - DNA, 201 bp, Bos taurus
gtggattttcatttttagaagctgcacttagtcaacagaagtttaggtaagaactgtaagcaagaaagaagccctgttcaaacctattccccaaaactatmaaaatcatccatttacaatcaagtcagaatgtcagcaattgtcacagctttctgttatctgacttgctttccctgtatctttacttttagaaactgcccc

SEQ ID NO: 40715 - DNA, 201 bp, Bos taurus
tttacatattaggaaaatcagctatttccaatatgttacaatttaatttttagtttgactgttgtcttttgattttgattttatgtaaaataaattcatayttagagggcctcttccacatcaagattttatgtgcatgtgtatatatatatatatataaagactgctattttctgagactgaataaaacatcagaagttg

SEQ ID NO: 40716 - DNA, 201 bp, Bos taurus
tctcaacaaagagaagatgagtcttatttaaagggaacattcaagccaaacagggaaatggtgcttttgagttgctcaggaaggatggatatcagaccaamctgtgaaaatggaatgggattgtccatcagatcaggatgaagggaatttgcccacttctgggtatttgcacaaaagaattgaaaataggtgctcaaatca

SEQ ID NO: 40717 - DNA, 201 bp, Bos taurus
gttcttctgtgacgatggctgtgcctggaggaggggagcaaaggaatgagagaggttcctgacaaacacctagaagctgcccagaatggcagcaggcaggygagcacagtgagaggccccagactccgtttggccccccacccacccccactttgaggggagcaggtaggcctctgactccaaggaaacctccaggcaaga

SEQ ID NO: 40718 - DNA, 201 bp, Bos taurus
atgttgttgaatgagtagcaacacccagtctggaaaagagctcagtggaggtcctagcatcgtagcatggagctgggagtgaaggagatgagggtttgtgktttttttttttgctgctgagatgagacttgttaaaacttctcctctaaatttcatgtactgaatggaaaggggaacactggggttgaatgtgaaagcatt

SEQ ID NO: 40719 - DNA, 201 bp, Bos taurus
gggccatctctgacttacgtttcataactctgggtggcggactgttctgtgaagataactcctgcatagaactcacacacctcttactgcctcagctttgktttgttttttgtctaggccttttttctccccttgacttttgctccttctgttgaatctcttgtactgtttggttgcccctcaacatctgggttttcttta

SEQ ID NO: 40720 - DNA, 201 bp, Bos taurus
tcataggtgttttgaatgtttacatgtggatttgttacagggcaagctactggctttttctgcctattgagtattttggggggtacagtcaattcagaacrtatcctgggatgactcttagatggtatcatccatttaagtttgatggataaacaaccttgctgatgaatgcagttgctcacctgtcgtagcaatcctgat

SEQ ID NO: 40721 - DNA, 201 bp, Bos taurus
cctgatgaacactcttatgaacgagtctatctatactctgttccccctgtgtttctggggtgcccctgcacaccagggaactgggagggggcagaagggayaaggaggatcacactatgtgagagaatgcacagccctcaggaggggaggcagacccacccgtgagctttagggaggcctcagctgaacaaagttgcagaa

SEQ ID NO: 40722 - DNA, 201 bp, Bos taurus
aaaggatggagagaagcaaaccactcagccctggacatgtgcttcatccagaataagaatcagcccgtgagctctccagcaggttaactaccttgccgttmggggaggtatatggggttaattactaatgaggcatgggctggtggctgcacacaatatccttactctgacactaaactctctgggtctttaaaacatatc

SEQ ID NO: 40723 - DNA, 201 bp, Bos taurus
tcacctggagaggtccccggagaggccagggtctccaaaaagcccagcagacctgcacccaggacccttcaggaccatcctgatgatgcctctgatgctcygtggcttcctggggccttgggcacgcacggaccaggccatctggggaaagaggaagacagcagggctctggccaccagcggaggaggtgggggagggtgg

SEQ ID NO: 40724 - DNA, 201 bp, Bos taurus
ttcttaacaagaagtctggaggcaggaggcccagggttgctttagtggttcaacagggtcctcaggaactccatccagggtcttcccatttgtctaccttkatgcttttgttcttctgtctgtggcctccttttcccagggtcttgacccaggtatcatgtactttcatgccaacaggcagagcaggaagttaggggtgga

SEQ ID NO: 40725 - DNA, 201 bp, Bos taurus
ggctgagcatctgccagagatggagcccaccctcccttttctcccctccacagcttcctctctcacgagactcggtggggagcattgtttgtggtgggggrcaacttgtggccaatctaatctcctttgggggcttcttcctgggctgaggtgacttggtttcttcaccttactcaggagaatggtagcagatatggtatc

SEQ ID NO: 40726 - DNA, 201 bp, Bos taurus
taaaataattctgggttcctcatattggcattcagcacccttcatataattctgacctactttttcatcctaattacccacctcctcttttatttactaaytgaattgattagtttctttgttggcaatgtgtgcatatttctagctctgtacctttattgttcccagtatctagaatgctcttttctcatccccttaaaa

SEQ ID NO: 40727 - DNA, 201 bp, Bos taurus
tgaaatcagtagaggatgatggtgaccatgacataagtgaaattctcactgcgtctctttgggggagaagccatgagggccagaccaggccccatgaggtrtcagccagcccagtcgtatggaggcaggtgaaggagggctccagaaacactcatggtgcctgagctgtttctctactcctgctcagctccgaggggcctg

SEQ ID NO: 40728 - DNA, 201 bp, Bos taurus
aatatggatatttttctaatgtaggcttgaaagagaatgaaagcgtgtgctgcctaaattaatttgttgtgaaaacaaaatcacttcattctccagattcyttcaaacacttgatgtttcctctagttttctggctctcatccttcatgacccatctcttttctgggaactttttcttggcttagaatcctagcgttgctc

SEQ ID NO: 40729 - DNA, 201 bp, Bos taurus
tgcttaaaaaaaggtgaaggattctgacaaggacgaaatcattgctaatttggtgtcattcctcatttcctgtggattgaaaagttggccttttacagaargaacttgagtgtccccaagctactggataatttctctgttcctgattttatgtctaggagaactgtgattctctgaggggcttggatgaccacctttgct

SEQ ID NO: 40730 - DNA, 201 bp, Bos taurus
agaattcaaacctaagtattagtactctgaatttagtatatcttatacttcagtgtcagaaaccatacccccaaacgcctttcatactgctaccctgggarggctagctctttgcgtccttgggggaactaatcaaaacagcacaaggcaatttgaaaacttttgaccagagtagaaataagtttcatattttgggtcaga

SEQ ID NO: 40731 - DNA, 201 bp, Bos taurus
tggcctttctttgtgatgagcagccatgctggcctgcagcttctatgtggaccaaggtacaagccctggcagaggtccaaggggccatggattcagagccyggcatccagtagaagcccattgagagatgactttcagcagcagaaagatatgcatttcctctacacagcaatctggcccctgcaaaagcctgaaccaaga

SEQ ID NO: 40732 - DNA, 201 bp, Bos taurus
atatttaggtaatttcttttacagtggctgattcttgtgtgccaatccatgcccttgtaacagcagggtgcttatcttccccaggctgctctgggatgctraatcatcataatagccccacttactgtccttgctctctgtaatgaagacagttaggaaaacctttccctacccccagcaacatcttttctcctgtggcct

SEQ ID NO: 40733 - DNA, 201 bp, Bos taurus
tcaactgggaacatctgctgtcatgttaggagtgactaagtttgatatgacttttctcaatttagatatttaggctgatcagttctcgcttttttatcatktgctgtcaactggtcttacaaaccaaagcaaagaggcaggaaaggagacaaatttctaatactctaatggccaaaggatgacattacccatgaactcaga

SEQ ID NO: 40734 - DNA, 201 bp, Bos taurus
tcagggaccattcacaaatgacaagggccagaatgtagaggataaataatatctcaggctctttattctcagtgggacagtcttttcaatttttaaagttktaaaagttcttaggccacattttgtgacatgcaggatcttagttccccaaccggggatccaacccatgccccctacatttggagtgcataaccactggaa

SEQ ID NO: 40735 - DNA, 201 bp, Bos taurus
ctaactcatctctggcttgctctatctctctctttctcacaaacacctggaaaagcaaacaggtattttttgtttcttgcaaggccactgaaaaggaaatrttacaaagaggagccttgattcagacaacgaagagacactgagaaaggaatggaagtttgagtatttctgagaatggcagcagaaacgaagggccaacca

SEQ ID NO: 40736 - DNA, 201 bp, Bos taurus
ctgtgttatattcctattggatactactgaacttggggcgttgagggggtggcgacattactatgagcagaactgtctgcgaagttgtcacagaaacacckcgacccaagttgacagttcagaaggatgagtcaacgttgactgaatagagagaggaggcagacttcttaaatggcaggaagagctagggaggcaagatgg

SEQ ID NO: 40737 - DNA, 201 bp, Bos taurus
aggctgacttctggcttggccattgggagatcccatgagaaaagtggggcgggggaggaagagagcagccacagcactctctccttttctctctgactttmtggcctccctccagtggctcctctgtcgtggcccaggctccccccagatcagccaccatggctccagtgaaataagagcagcaatcagcatttacatagt

SEQ ID NO: 40738 - DNA, 201 bp, Bos taurus
gcttcctgctactatacaatgccggcgagcaacagcaccttggccaactcttaaaacaggagtcggctgacttatttctacaaaaagccagatagtaaatrttttagcctttacaggccatatagctactcaactctgccatcgtagtatgaatactgccgggagacaagacataaataaatgggtgtggctacagtccaa

SEQ ID NO: 40739 - DNA, 201 bp, Bos taurus
cccagagcctcactctgagcacagttttgtctcccaagactgcgttgacctttctataaagggctgagatcagaccaacgtgatgctgggagtgcaccagragaagcaatagctgggtaggtcaagttctgatgcattgtgagtacatactcagtcgtgtccaactctgtgactccatgaactgtgcatgggattatccca

SEQ ID NO: 40740 - DNA, 201 bp, Bos taurus
acagtcctgaggttgaccataagggccaaaaggtagaaggtggcccaattcctagcaatccctgccccttccccaaaatagttggtataatcttatccagyccataaaactaagcaaaccgcagggcccctcatcttctgacatggcctacagtctatgatggcctggcatgcggcagtccatggagtcacaaagagtcag

SEQ ID NO: 40741 - DNA, 201 bp, Bos taurus
aaattcaagctacagaacaggcacttaaagcatgttacataagagaggagcagcttcatctggggcgtggacattagccaaaatgctggccttcagtgtcyctagaccaggcaggtatcaagagcccatgtaaatccagcccagagtagggagacacactgtggtcaggctcactggcagcccttccaacctccagatacc

SEQ ID NO: 40742 - DNA, 201 bp, Bos taurus
gtggggtgagaagcacctctctgctagacgcacaaggccctgggcacacagggtgcctttcaccgcctgatgtcagacttgcttctctgtgccctcagcaytcaacccctcatgcttcccaggcctgtaggattttctggtcatgtctgggcagatctttctctctgcgtctgctgaaacctggaagagtgagattcgcca

SEQ ID NO: 40743 - DNA, 201 bp, Bos taurus
tggctcccagttactttgggaagagtctttcctaaaatggaggaaacagacagaaaccctgtcagcaaaatgatgcaacaaaaatttgctacttgaaaacrggccgatatttttaagtgaatctttgttgcagctatttctccctgaaggacaggaaaggtctgccttcacccctctagcacccacaaagggaacacattg

SEQ ID NO: 40744 - DNA, 201 bp, Bos taurus
aatccttctaagaaagctaaaattaacctcgtgttaagtgccatgaagtaaaaggatatagtgctgtgatacagtgagtttataatcaagtgtttatccartgaaagactattcagctttaaggacaaagctcatcgtagtcatttcacatagaatagagacaggcatcttatcccatgagtgaggatgatcttcttttat

SEQ ID NO: 40745 - DNA, 201 bp, Bos taurus
aacagatgagatctactttcctcatttaggcatatgaggaaggttgtgggtcccttgctttctattcaccccatgtcagtgtgggtaacatgtcagaagcrggaccccacatagctactaagaaaggataattgctcttcaaacactgtaaagagacagcaggcaaagcacaagggttgggacagtgcaacaggacacctg

SEQ ID NO: 40746 - DNA, 201 bp, Bos taurus
agtggctgggtttccccccaagtggaggaagggggtgtatttgatgtagggcaagttcaaaaccccaaaagccttccacgctggtaggtcagatttcactygcaaggtggggaaatacaacatgtgaaacgtgaaaaggaccaccaacccaggaagtcttattccgccgccgcgggccagcctgaactcttgctttgactg

SEQ ID NO: 40747 - DNA, 201 bp, Bos taurus
gtggccacactgggagagaagtctcggggcgcccctttgctaccccagccttcaacacaccacctgccccaactcacacactctcagctcgataggaaatkcgccactttatggcctcgcgtaaaagtgccattctgaataaacacaaaagcgatcaaatgctcttgagttgttggtcttaaatatcagtcatgcttcatc

SEQ ID NO: 40748 - DNA, 201 bp, Bos taurus
ctgttatcctgggaaattattccctaggagcttccgttttgtcctctgaaaatacagggacagtggcatcagcacccagagggatgtgggatttaaatgaratgttcgtggaagggcagagaacagctttcaggcatctttgcaccgggccgtctttgccgttcagtgttccgttgtagaaagtgagacctcacggggctt

SEQ ID NO: 40749 - DNA, 201 bp, Bos taurus
agcccattttacagacaggaaaacccaagtccaagatgatttcctcattgcatcaaggaacagccgttagggtctcaggcagaagatgccacatgactccmgcttttatacttgtcctctcctttccatccaagtgccttttcccaaaagtgggaagaggaagaaggcgaggttacttgtagctcccctgaaacaagattt

SEQ ID NO: 40750 - DNA, 201 bp, Bos taurus
ggcagaactgcaaagttgtggcgattgcttggagatagcatcacaaggtttttttattctgtaagacgagaagcagcctgcctgtgcctgctggtctgaaygcagggcctgtggaaatgcctaagaaagatggaagattttagaggaaagtgtggtctttggaaaacataaaaatgagtagcaggccaccgcaggggcctt

SEQ ID NO: 40751 - DNA, 201 bp, Bos taurus
aaaaataaaaaagttataaaaattaaatcacaataaaagagacatcaaaaggcaacatacttttaattgacacatgaaatgcaattagcaaagtaactacsataagtagaggaaggagagatcatttctagaaacagtgggcagggatgactgtcatgaaaaaatatatcagccagatcttgaaagctgaatccaataaga

SEQ ID NO: 40752 - DNA, 201 bp, Bos taurus
cacccacaggataagtgtcacaatcttttccaagggatctatcgaccctgagataagaatccctgccttagatgcttgccatatttgaaaagaaagctaakgttttatcatttcacagcagtcttagtaccctggagagcctctgtattttaagttgctcataaattgactgtggtcatatgtgttagtggcttccatgat

SEQ ID NO: 40753 - DNA, 201 bp, Bos taurus
agcagaggaataaggatgaagacagactcacacaaaagttatatgggtgtggtgcgtggaacccagcaatttgaggcccacctctgttccagccacaagcycaagttcacaactcagacagaggctgggcaatggggctgtctgacgaactctacatcctctccagaaactcctaacaattcatgttttacaaggccaatg

SEQ ID NO: 40754 - DNA, 201 bp, Bos taurus
ctgatgatgcagatgttctcctgatatttcttcataccttagtgagaacatggccatctggaccccatctggagatattgttgggtactcatggcccacakaaatctacattcctgtctccctaagcttttgcatgccttttctacattacactaggaaattctggcatctcagctcattggatataggccaccattgagc

SEQ ID NO: 40755 - DNA, 201 bp, Bos taurus
catgtataccttgattttacttgagaatgttttaaaaatttctaatttactcttctttctcttgaatatttaccaaggcaaagtgattagttaaatatatktaaaaatattctacatattcttttattatttcatgatatattacaagtgtttaaagcaaaatttatttgtgttttattttctagttgttttttatcttta

SEQ ID NO: 40756 - DNA, 201 bp, Bos taurus
aatttgtatgttgaaacttaatacctaatgtgatgcgttaggagattggggaagtacttaggccatgaaggtggaactcttacaaaagaggccccaaggarcttccttgcctctttcccatgggaggttacagggcaaagacattcatctaagaagcagacgtttatctaggaagcaggccttcacagtactccaaacctg

SEQ ID NO: 40757 - DNA, 201 bp, Bos taurus
atcattccagataagttgtgagatgaatgatcagagtagaattgacaggtttttcctaagaataagagaggcagacctgagttgaacaatcccaattcatmaatacaataagtcactcctcctcctattgtcaattatggcattgattatacaccctgaggaaatagatcaacaatttttccagataactctagtctcagc

SEQ ID NO: 40758 - DNA, 201 bp, Bos taurus
gaaataccttggtgcctagcactcagagtcctcattggcttaaataaggtctcctacatttagatagcaaacacaacattgctagctaaacataaagtatkctagcagagatttactgtccaacattttcatttatacatttttaataatgatttattgattatccttaatgtacaaggaacactgctagagaccagggaa

SEQ ID NO: 40759 - DNA, 201 bp, Bos taurus
tttctttacatgcggtgcaaggccatgattggtgggatatgttaagcaacatttgggggttaaactgaaaaggaagtctcctgttagacagaaccatgaaraccatatgggacagtactcaccatttttcctcctagatatagaagctcaggagtcttctcatcttagcatttcacactcatttgcacgtcgtcgtggtcg

SEQ ID NO: 40760 - DNA, 201 bp, Bos taurus
cacctacactctgctcagcgctattctaaacactgggatgtagggatgaacaacacagcaaggccctggtacctgagtagtttatattccagctggagagrcaggaaaaccataagcaaacaaaaaaacgaacaaatgatttcagacagtattgggtgctatgttagtttcttaggactgttacaacaaatgaccacaaac

SEQ ID NO: 40761 - DNA, 201 bp, Bos taurus
aagacgcagtgcaagctttccgattatcctgtggagccagtgctcctccttggagggaagtcgcaggttcctcgaggcggcctttaatggattcctaactmcgatgttctgaccaagtttcagagaggtcagcaggggtccctgggatgtccctccaccccatcacgggtttgccaacaaccaggccccgacagagctgct

SEQ ID NO: 40762 - DNA, 201 bp, Bos taurus
gacagtatgaatagcctcagctgtgttggcagcaaaaatactgtgactacacaactgagagtcaccagaaggctagctgacgcatggctggattcacaagraacagttggctgacaaaacaccttctgatcctgacttgatgttggaaaaagtggtgacatttttaataggatcatgttgtggctgtggaagctgtgtttg

SEQ ID NO: 40763 - DNA, 201 bp, Bos taurus
tgtccactgataagacactgagatgacacatcctgtctgttttagggttggatccagcggagccttgctttgagggcacacctgaattggtccgattggaycccagcgatgcccagtttgtggatgtaattcacacagatgctgccccaatgatccccaacctgggtgagtccctcaattcatcctcctggagtgtttttt

SEQ ID NO: 40764 - DNA, 201 bp, Bos taurus
gccctggccatgaacccacactctggacggggcagcaaattcagtcaacaggatacagactctgcagacactcctaatgccagctctgtgccaggcactgractgaggggaagcggcctaccgtgaggcagtgctcttggcatgccagcatgtaaacaaacacagccctgctgccctctgcctgccaaaagcaaggtgcat

SEQ ID NO: 40765 - DNA, 201 bp, Bos taurus
ggcaaactaaggcctagatgtgttcagtatctctgtgatgactgaccagctagaaaggagcagagacaaactctgcacccagacccgggtctatgttgacrctaaaggccaagaaaggtcttaacaaaattgttacttttggtctcggatctgaacagtgcctggcctacaggaatgtttagcagctggtggcatttgtta

SEQ ID NO: 40766 - DNA, 201 bp, Bos taurus
ttcttaatgactctcagaattcagaagtataacctgaaagagtatcaactgctgcttctatcagtctagtcgaattagcaaagtctgtctctcctgttctrtgaccccaaaacatgctcatacacttgccatcatagaatgtatcacactgtaggggcactggggttcttttaatttgctttgtcttccactgagtgagca

SEQ ID NO: 40767 - DNA, 201 bp, Bos taurus
cctccagtgggatgtaaccaatttccttctgctgaaactatatagaagtttctgtaaaagcccaaagcccttgttgtggcctcgagatcctacatgattgyatccctacctacctcccaagcttcatctattgatcatttttctctgactctccaaggccttttaaataaacttcttcaaataatccagcctccatcatgc

SEQ ID NO: 40768 - DNA, 201 bp, Bos taurus
gggccaccgcactactcgcagggggactgtggatcatcgctgcgtaaaggcccgtttttccaggagaaggtgtaaggcctaaagggaagtaggaagtgagygtgaatgggaaggagtattgccctgcctttcaggacccaaacccctggccataaccggctcgaatttagccccagaagcactaattctgttgaaggctac

SEQ ID NO: 40769 - DNA, 201 bp, Bos taurus
ctggaggactttctctggccactaaagtgcaggcatgtgcagggcaggttagaagtgccaaggggttaacactcccgggtacatccctgaactgatgaccygtgggagtgggtggacatatggccccagcttcttgcccctctcatgggataactttggaccacattcaacactgtctccccgagctccccagggcagtca

SEQ ID NO: 40770 - DNA, 201 bp, Bos taurus
gctggaggggaaatccagtctccttcaccttgtgtttccctcttgagtcagtcgcaatttcccatttggtgctccttttcattgccaccgtggccatcatygtgggattgtatgtgccacgtggctttctcttctcttccacctctggtcatggacttcccaatagacagccaaagtggtttccttcagggttggcttggt

SEQ ID NO: 40771 - DNA, 201 bp, Bos taurus
atccagtgtgtttttcaaggccctgtggctctttaacattttaactttgtatggtcttactgcattgccagtgatggccccattttctccctatgacactrgggtcggcgttcagataacccctgcgcatcttgtaacctggcaaggctttggcctgagttgcttggcctctggttacagatcacaccattttccaagtta

SEQ ID NO: 40772 - DNA, 201 bp, Bos taurus
catcctgcctgttttaccaactgaccctataaaaagacaaagcacgatcatttctatcctactgttgactcccccaagcaagacaattagttcggtggtcyatcaggagacagatggcctgctcaaattggaaaatttagagtctcctttaaaaaaaaagtccatctacaaagatgtgggtggggtacagaaaaaccaagg

SEQ ID NO: 40773 - DNA, 201 bp, Bos taurus
cttggcatctggcctaaactcactgctacctgaaagagtgccaacctgttcagcacatttgaatttgcaaataatctcttatttactctcagagtatccaygaagctgaagcttgtgatgggtttttattatgtggtaataagtactgttggggaagatctatctttgcaaagcccaattagtgtatttatttattaggct

SEQ ID NO: 40774 - DNA, 201 bp, Bos taurus
gcaatggacatggccatgacctgctgctttagctagttctgcgagcccagtgcctgtgcattaatgattagaggagaagcgggtgatgtccagaacttcgyggaggatgttttctcataatggccagttggttttacatgataccttgacagatgaaaataaggactatacccataatggtaataatgacagtaatcatag

SEQ ID NO: 40775 - DNA, 201 bp, Bos taurus
aaacacactttgtgtgatgggcaatcgctttgcactcactgacagaaaaaagaatataaggggtgccaggaggcaaaaaggcggggccccaggaccacagygttccctgccagcagcccccttcaccctccttccactcatctgccccagtcctaaaggtcccagcagaacaaagcgtcctcacggccccgccccccaaaa

SEQ ID NO: 40776 - DNA, 201 bp, Bos taurus
tgatggcctgggagcctggaccagccgccgacccattgcccaccaccgtctctgagctctggttgaccggacttgaagacgcaggcagcagcccattaaawaagtcaggggccgctggaccctgagtgggcaatgaggccatagccacctgtccaaagataatcagagtctgtcacctcccattctctttccgtcccctcc

SEQ ID NO: 40777 - DNA, 201 bp, Bos taurus
ctttctgacagaaaaggaccaccaggaactagactcaccgcttcacccttgctctggctatgctggtgggtggcagaagcgttttgtctgcatttggcctyccatttactcgcaagcattcctgtctccagtcatagctccccacaacatcacatctgaacaacaactcctgaattgcatggctgtaatattgacaaacag

SEQ ID NO: 40778 - DNA, 201 bp, Bos taurus
gctcagagaccacccagtcagcttccccagccgctctcagctgcacagtccccggaagcaggacgctgtgtggaaggctctgctctgcggcccctctggaytcctctgagattccccctaagccttcaacatccacccacgtagagctgggtctcatactgcctccagtccccagaaaggcccagaaaaccaaaatctcac

SEQ ID NO: 40779 - DNA, 201 bp, Bos taurus
taacctttccctgaggaatacttggttcgtgttctgagtgcagcacacccccctacccccacccccaccacacacacacctgtgtcttggtttctggctcygggcagagatcaatctgtggccagtccccccccagacaaggtttctgaaaagatcgttggggctggaatgttttaggctggtcttgggaagctctctgtt

SEQ ID NO: 40780 - DNA, 201 bp, Bos taurus
catatggtatggcccaggggcctgggggaggtggcccaagtggtctgggggttgactgttttcctataataaattttgcgctgccggccaggtccttcctkcagtcactctcgcaggagcctgtgttccttctcggggctgcagatgccccagcagctgggagaggagccatgtggctgaagccccagctctgaggcctcc

SEQ ID NO: 40781 - DNA, 201 bp, Bos taurus
agcagcagggctaatccttacattgcaccaccgcagctgcagcagtgccagacaccagctcatccttcccatcctccgccctccgcaccccccgttcagaygtaccaggtgcctccaggatctttgccgccggtatgaagacatgctttatatctttatatcattcactgtaattctaatccctctcatttttacctgtgc

SEQ ID NO: 40782 - DNA, 201 bp, Bos taurus
tgtagaattattcttaatttctgcaggactcattttaatcactgacctccattatccacagagagaaagtgaaatgactgagttccagagtgaagggcgtrtgcacaaccatcactcagggatgagagtggctttgctgggtaggggggtgaggtgggggcggctgtctctttgtgtttcctcctcatctctgtcaagatg

SEQ ID NO: 40783 - DNA, 201 bp, Bos taurus
ttgaggacaagacagcatctgcctgctcctgtttcgggtcactgctgaaatgccacctcctcaggaaggccttgctgaaggcccagtcttctctatcaccragtgctgtcggcttcttccaagacacggatcaccatttgtaatcacacatttgttgagtcatttgttgtctagaacagaagctctgtgaaagggccaggc

SEQ ID NO: 40784 - DNA, 201 bp, Bos taurus
agaggtcagtggtcttaggacaggcaggagataagccactagctatgtgaagtcatgttgactttgatctgctaggccttttggctccgaaagaaaggcakcaatgagccagaggtcctctaatctccttagagataagctgaaaccgcttggctggggtagggggatccaggcttctctctgtgcactgaggccagactc

SEQ ID NO: 40785 - DNA, 201 bp, Bos taurus
taaactgttcaaagaatttgcagattctgagcatggaagatcaaatgttgcaatcgaagggaatgaggatgtttaatctaaccggaaaagaaagctccacrttgcagaaccatcagaattcactgagtctttgcttctatgacaggaaaccaccaagtttaacattagaagcgttcattcagaaatccaaagtcttggttt

SEQ ID NO: 40786 - DNA, 201 bp, Bos taurus
ttttattaatgtgactctccctgccccacttccacaccttggcctgaaaccgatgagcattctccatctgacatggcgagcctgctccacagcctccaaaygctgactgggttggccctgctaagagttcaaagccgactacaatgaccccattggtctttgcactgtaagcctccagctcatttagggaattatctgcag

SEQ ID NO: 40787 - DNA, 201 bp, Bos taurus
gccctaactagtcactcttgcaaaactattttagagaacttagataacatagagttccagtctttaacagctttgtccagggccgtgcagatcttccattmctgatggtcacatctggagctgaaagggacttcaaaactatgaagatcacagcaatttcgtctagagagaatgagggggcaactgtgggtgggggaatca

SEQ ID NO: 40788 - DNA, 201 bp, Bos taurus
cccacaaagcgtttagcctggcacctgctaagagctcagtttgctaccaacaccacaatggcttctcttagcatcttctctttttttgcctgcaccccagyggtatatgggaacttagttccctgaccagggaccggacccatgccccctgcattggaaggtgatatcttaaccactggaccgccagggaggtcccttagc

SEQ ID NO: 40789 - DNA, 201 bp, Bos taurus
actaatccaccagctaactcgaacagcattggaactgcttacccatctgtttccccaatggaatggattccatagaggcctgaagcccaaaattggagtcrgggctgggggatgcagtcgaagtttagcgggaacacatcagatgtgttctggcccaactatccatacctgggaagcaggcaggcacaagaccagaatctc

SEQ ID NO: 40790 - DNA, 201 bp, Bos taurus
tgcacctacaggggtgcccctccaggctgttagggagctgacatgggtccacagcagagaatggattgccagttgccatctgtccctagaaactggcagcrtggaaaaaaggcttcctgtggggtgtgcagggccagtggcccccactaactgcatctcagcctccctttcttctcaggcctgttaagtcatccagcatta

SEQ ID NO: 40791 - DNA, 201 bp, Bos taurus
tgggtgaagaagagaggatttggaggcagtaaacaggccagagtgggatgtagccagtggtttctgagctatcagtggttcctgtggataacaagaacccrggagctgggttaaatggccctgaaattgtttcgaatttccttggtctaacttggagagttgtttctttctttctttttttttaatcttttcccttcttgt

SEQ ID NO: 40792 - DNA, 201 bp, Bos taurus
acaggagaggttctgccctccgatctggtggccctctttcttctaagaggtcagtctgcctgctcccgacagctgttagctctggctgttagctgttctgytcaaatgtccggccgcagaatacctttaggacccgaggctgagggaccctggcattccattggacggtgggtatccctgatgtctggttgaacaaaactg

SEQ ID NO: 40793 - DNA, 201 bp, Bos taurus
ctctcagaaagagctttgtgtgtgtagggaacttactgtaccctcttagcagtggctgtaatcgctacattacagatgagcgagttgcagctgcagggccrgaaagcagcctgcaagagattccgcagccaacttggggcagaactgacccctgcccaggtctgacctcagaactgtgtgactctggacaagttattcccc

SEQ ID NO: 40794 - DNA, 201 bp, Bos taurus
ctctccccacctcctccttggccatgttttgtaacatcatcgcccacggcatctctctgtctttgtcactgccttgccttctttattctctaacttggctyccctagtcacacattaaggaaggctttccctggtggcgctgtggataagaatccggcgaccaacacaggggacatgggttcaatccccagtccaggaaga

SEQ ID NO: 40795 - DNA, 201 bp, Bos taurus
ccattttactttaaaatcgttattatgtaaatttgcagaagacaaattttaagtatacctcaagtgttcctataaatttaagacatttagtaatacttcarggtggcttgcaacttaaattctataacttttgttaggaagtgtaggattccattgtggaataaactgtagatgccccccaacaccccaccccctcatcag

SEQ ID NO: 40796 - DNA, 201 bp, Bos taurus
cctgctgttccttctccccctcagctgccagtccttctcctcctgtgcccctcgaggtaacgctcaatccatcgtgcaccctcacaaagagagctttgctyagtgagaaaagcatccttgtgcctccccgggatgtggaccagccgctctcccagctgtgcggtgtcaggttacttaaccgcctgcctcctggtgcagctc

SEQ ID NO: 40797 - DNA, 201 bp, Bos taurus
ggggaccgtgtgtgatgacttctgggacctggccgaggctgctgtcgtgtgccgccagctggagtgtggccaggcggtggtggcccccacgggggcccackttggggtgggttctgggaagatcgtgctggataacatgcagtgtgtgggcagcaagagccacctggagcagtgcatgcacgggggcgaggccgggcacaa

SEQ ID NO: 40798 - DNA, 201 bp, Bos taurus
gctgaggggtcctttttctccagatcctcacttttactgtctgttcacagttccagctattcctcatgctgttggggggccccctgtaaatggtaatttakcttctattctcagattatacaccaaaggtttctttttcatcaggttcagcagccaaaggaccagtggtctggggctgagagcgtttgaagggctgaggga

SEQ ID NO: 40799 - DNA, 201 bp, Bos taurus
tgggccaccctctgggctatgcgcaggcgcagtgcggtggtcagacaccccgcccccaccctcccagcctttacttaactttaggttcattcactcagtcktggcccattccttccgacccaggaactgcagcacaccaggcttccctgtccatcaccaactcccagagcttgctcaaactcatgtccatccagtctgtga

SEQ ID NO: 40800 - DNA, 201 bp, Bos taurus
taactggcctctggcactgggaatgcttccagtagctcctgcaaactttgagttcctgttcaccagagtgaccaccgactacttgctgagacatcttcackaaggcgcaggtggccgaggttggaggctgagggagcacgcagaaagagagggctgagcagttcctcttagcactggaattcacacagatttgaatattca

SEQ ID NO: 40801 - DNA, 201 bp, Bos taurus
cttgcttctcttccatcgcatggaggctggtgcgctgcagggtgttatcatcagttcttttcttctcacttccacacctcctctgggccctttggttctcytttatgactcaaattatagtaagattacagttaaactatggcttgaaatcacatctgtctcttgagctcaccacctgcaaacccaggtgccttctgcacg

SEQ ID NO: 40802 - DNA, 201 bp, Bos taurus
aattacttttggatgtgaacaaaaggtccattttgggcactctgttctgtgatgtctgtgtatatatatataaaacccttttaaaatctaagcctcccackcacatatgagtttccttgtctttagagattagaacactgcagccactatttgttttgagcaaacagagtgctgtgaagtcctgtaatagctcattggggg

SEQ ID NO: 40803 - DNA, 201 bp, Bos taurus
gagggtacctgcatgtcccatccctgggatgaggtctggggagccggtgggatcccctgaactgcccatcactgggccagagctgtgagcagaaatagccyggcactgggtgtctaggcaaagggagtttgagtgaccccagagcggtgtgggactggccagatggctctgggtgctgactggatgctggtgggaggaggc

SEQ ID NO: 40804 - DNA, 201 bp, Bos taurus
actcactttcgattcacatgacaacttccactccttgctgtgtgcggctcctgactctcctggtcagcgattgggactgagccaggtgctagcaggctgaygtttcaccagccatggctgccttgccatcacatcaccgaggactgatttagacctcgcattcaccatggaaacagaatcccacaccacctctgtatttcc

SEQ ID NO: 40805 - DNA, 201 bp, Bos taurus
ccctcccccacccccacttcacacagtcagggccccataaatacgtggtgaaagaaccagtgaagcagtcactgaacagacgagcagcctcccctctaccytaatgcccggcccagagccttgtgcaaagtagatgctcagaaaacccttgctaagaagttaaatgcggactctgcagactttctagctgggtgtcccctt

SEQ ID NO: 40806 - DNA, 201 bp, Bos taurus
ggcctggcacacagctgggattcactcggtgctggctgggtgaacgggaagctggttctagcctgtttgatcacggtctgcatgactgaagcatgatgagktcagttaagcacattctaggccaggggtgaggccaacacacagacctttcagcatttctatctcatagacttgaactggttccttttttttttttttttt

SEQ ID NO: 40807 - DNA, 201 bp, Bos taurus
cagcctttcttgcttcagagacccagaaggcctggacccggacaaattctagaaacatagcataggtgtcaggatgagcctgcccgggcaagaaggccccrgcacacccgctcagaactctttgaagcttggagtggggctcaggaatgcaacattcgaaagctggcctccccagaacatcccctgatctgccctcggctt

SEQ ID NO: 40808 - DNA, 201 bp, Bos taurus
agaatcagtccctcaggaaaatgagcacggctataaacagacggttaacagcgaggagacagcatctgatgaggaagcgaggaggcctctgccagagataygggaacagggagacaccgcctccagccatccgattctcagcaaacggaaggtcgatgagagcacaggtagctgtgagcttgcagaacaggggtcccgctg

SEQ ID NO: 40809 - DNA, 201 bp, Bos taurus
gaccctcctggcggtgagtgtgtgtggatcccctcactagtaaaatctgcctgctcctggagtgtccctggggatgtcagactttgggacatgcttccctrgtggcccagaggttaaagcgtctgcctgcaatgcgggagacctgggttcgatccctgggtggggaagatcccctggagaaggaaacggcaacccattcca

SEQ ID NO: 40810 - DNA, 201 bp, Bos taurus
ggccttctgggatgtcctggtcttcccggagaagacggggtgctcggagtcccaagtgcctttgttttccaagttggacgccgtgttcgcggcttcaagcytggccctccacctcctctggagcttggcccctcagctgcgctggtcgtccccctgctccctgtcgctccctccccgtccgcctcccaggaccctgacccc

SEQ ID NO: 40811 - DNA, 201 bp, Bos taurus
caagctggcgtccccgagggccagaatgaatggcccccctcactgggcggctttgcccgtttacgaggtgccgtctggactgtgatgaataagtggcatcygtcagcttttcggggaacctggccagggtggaaggtgctaaatcaacatgggcgaggggcacctggctctccactgtttcactcctggcccgcgccagcc

SEQ ID NO: 40812 - DNA, 201 bp, Bos taurus
gggtcaggtcaccaaacaaaagaaacaggaatagaagctaatttttaatggcaaaccgccctgagcgctgggcacgctgtcacgttgtacagaaggcctcrgtaaggctccaaggagaggataccggacgcccccgcccctccattcaacaccgtctctgcacaaacaaccgtaaccctttcaacagtgacgatggctgtg

SEQ ID NO: 40813 - DNA, 201 bp, Bos taurus
gagcattgagacacccatttatttacttttggaatgtgcttgggttggtatgatgaactctttcacggtagtgtattttaaagcttgtggccttgattcakttctgtgcgctgataaaggttttggcatattacatttaaaatctgaggcttagcataggtttggaactcatgacccaggtgtaggatatttgctgtaaat

SEQ ID NO: 40814 - DNA, 201 bp, Bos taurus
cccctccagctcctgattcacacctgaccaccctcagcagctctccccgacatccagggacccacgatcatccatgacagaaacagatggtttcggacttygactgggccaggggaccagagctgcatacatggggggctgctgggagcacagaagggcatctctgagcagctgggggtgaggtgggttgagtgggagggg

SEQ ID NO: 40815 - DNA, 201 bp, Bos taurus
cacagggctgagatggacacctggcccctctgcctcgggacctgtgatgcgtgtgcacttgaacccaagctgggggctctggagctcgcgcgcctgtgtgygggtggccgcacactgaggcttcagcaggagagtccgggacccaaggctgagttggaagcttccggccctccctgctgcctccctcccagcgtcacaggc

SEQ ID NO: 40816 - DNA, 201 bp, Bos taurus
ctgacctctggctctctctcccccgttattccagtttatgaccgtgggcaaatctttcaggctcttttgtgtgtcttgagctacaaaagagacaaatgacrgtggcccctttgttccccatagccatgtatggccagatcttttgttttccctaaaataagaagttggaaagaccaaatatgataatcaagaagaaaattc

SEQ ID NO: 40817 - DNA, 201 bp, Bos taurus
aggccacgccgatgagtaattaggcagcaggcagagaccgggcagagctttatgggcccattagtacttgcccagctgctttcaaggttccagcctgcaayttgggtgttaggtacctttagtgtcttcagttaaaaaaaaaaaaatgacctacgtgttttttgttgctgttgtttctgtccaaatgtttaaagacatgaa

SEQ ID NO: 40818 - DNA, 201 bp, Bos taurus
agctttcgggggcccagacagctcggtccctggcacccggggatggagcccagggttggagtgggagcaggtctaggtcagctgagctgcaggccgccccrtgcttgatgagatcggctctccctgaagactggcttccccgtgtgcctacctgggggtcccgaccaccctactgccaccggggtcctggtgagggctctg

SEQ ID NO: 40819 - DNA, 201 bp, Bos taurus
ggctcctgtttgcttcagtcgcagtagctggagaggctccagcggggctggaggattttcttgcacggtggctcactcccttgactccactgggagcccakcggggactgtgggcctccctacccgagagagccaggtggaagtgcagagcaccgtggtaccgagtcgtttccagcatctgcttgaggagcagatgtgaag

SEQ ID NO: 40820 - DNA, 201 bp, Bos taurus
attatattaacaatatagtatgttgttatgccaatattatctggcatattttaagcctggtgtgtacatgataccatttgttattggggggtttcaagtakcattttactggtgtagctcaatatagcactagtaaattgatttaaaaggaggcaccttcttcattgcctttaaggattaaacatgtatctaaggacacca

SEQ ID NO: 40821 - DNA, 201 bp, Bos taurus
actcaacttgagtccgaaaaaacaagctgagattaggggggcaataaattctcaatgcaactctctcttcctacggcccagacccctgaaataacctgatragaacacaagtcctaaggctgggagagcttgggttgtagcagcaagcaggatggctattgtctagtgagcgagggcagggcacgggtgagatgcggccaa

SEQ ID NO: 40822 - DNA, 201 bp, Bos taurus
atggcctttcctgtaactgtaaagctcacttgaaagttaaaaaaattcccataaagattaaaaaaaaagaaagactccatgcacacagcagtcagcttgcrgaggccgagacatttgtttcgtaactagaccaaacttgaaagctctcaatttcgcctctaacaagatgtattccatcagagctttctacataaatcacag

SEQ ID NO: 40823 - DNA, 201 bp, Bos taurus
tgctgcctttcagtggacagcggccatctaactccgatgtgtctgcaaaatgcactgacgcacaacagccgcactccaaggacagaccagcgggaatgacrtaagacaatgatgtcctaaggccaagatgttgcctacactcaccccagtcttctcaaacacacacacacacacacacaatgctcgaataagtaaccttgg

SEQ ID NO: 40824 - DNA, 201 bp, Bos taurus
gccaggcacttgatcatttaaaagaccacctgcagcccaagtgcctgtcaggatggccggacattctgcacacaggaggcaccggcctctcctgaacgttygttgtcagtgaggctgcagtacgaaaacggggcttgtgatgaggaatgctgtgtgaggagaaggccttggctgggtgcctgggccggggtttgcctcagc

SEQ ID NO: 40825 - DNA, 201 bp, Bos taurus
atatcttttcatgagcctcgtggccatctgtatgtcttcattggaggactgtgtcgtgacatactcttatttgatttttttccctcagttatttaaaaatktgaacacctgagctcatggccgtaaaccaaccggcgacagacctgatttgggcggacctacagtttgctggtctctggtctcagtgttgctaaggcttag

SEQ ID NO: 40826 - DNA, 201 bp, Bos taurus
ggttttgacctcctagcctcctcctcaccccgattcacctgccgtccaggggaagggatcttgtcgaggtggccagagcatgatccaggcccttgaccctyttctcctggaaacaacactgctgaggtttcctttgtcctcggggctccacccgctttgttctctctgtgacttcctcctcccgtgcctgttcctctgggc

SEQ ID NO: 40827 - DNA, 201 bp, Bos taurus
gccttcattggtgatggtctgactaggtcccctttttttccagtagctgagaggagcctttttctagccagtggcaggtttgctatgttaggctgagcaaytctttgttcattagtggcctagaatccccaagctgacaaagcagtgtgttttaaaaactgaggttgcgttttgagaaacacagactaacagtgacccccc

SEQ ID NO: 40828 - DNA, 201 bp, Bos taurus
ctcatcctgtgactggtgtccttatgagacgtgaaaacaggcccagacaccagctcgcagggcgagtatgtggcagtgaagacagcggttggagtggagcrtctcccagggaggccagggtcaccacacattaagacacaggtgtgcagtagagtctcccaggctggcttcttagggagctgaccctctgacaccctatcc

SEQ ID NO: 40829 - DNA, 201 bp, Bos taurus
ttatgtccaccacctggtccatcagttctgtcttgggtcagttgcttccttgggctggttgtactcatttgaggggccaacactcacctggctgccactcytccaggtcagccgtctatgattctacaagatacctatgattcaacacatgggagcagttggcagtcatccttctgtgggtgccctgccccggcctctctg

SEQ ID NO: 40830 - DNA, 201 bp, Bos taurus
tgtcttgagaattgccaccatttcttacgaaggtggatgctgacagcttcacaaaggccgctgtgagggaaggagcgtctgagaatgccagccaggagcayggaggctcccaacaaattgtcaagtcccgacaatcgttcagacagcacgaggcaggggagagagccagcaatctggggcaggaggcctctgctctctccc

SEQ ID NO: 40831 - DNA, 201 bp, Bos taurus
agagtgtgagaggtgaaggccaaacatatgaaaagggagggtgtggttcagttaaacaagtcaatgtacttaagccagaaagtgcaaggctcagattcttyccaggcctgtgagcttcacagacctcattcacttcttttatcaaaacatgaaggcttgagaattatgagaattcaagttgaatatgatcgatgtaagcta

SEQ ID NO: 40832 - DNA, 201 bp, Bos taurus
agcggcgaagatacaggacttgctcctcaggctttgtgtgaacaggcctcagacagtgcagtgttgtaagacgcccggaggtttctaaatgaaggcagagygggacctgcaaccaggagcagggcctgctgtggggtggggcagctcggggatgagggcactaggcccagtgagatggggtcttggccccaagcagcccct

SEQ ID NO: 40833 - DNA, 201 bp, Bos taurus
gtccaagcagacaaggagtcaggaggccaggaaagaagccgctggcaccagcctccatgactggtcagcaaaggtggcagaatgcagccagtgggcaaagyggaggccaagggaccgttctgtgcacacacctaggaccccagcctgttccagggatgagggggagggcacactcagagggacctggctatttgccgtcaa

SEQ ID NO: 40834 - DNA, 201 bp, Bos taurus
tctagcagggtttcatctgtttgttctgttttccttcgctttttactggtggtatcagggcctcagtaacctggtcccggggaagggccattctcctgtcrttagctgaaactttttagaaggaaatttggcaatgcacatcaagtttggggcttcccaggtggtggggtggtaaagaacccgcctgccaatgcaggagat

SEQ ID NO: 40835 - DNA, 201 bp, Bos taurus
tgagccggggagccaggccagagtgctcgcagcctcctcgcaggcaggcgggtgaaagatggccccattcctcacggggagacgtgctgggcgagggcccrgtgccctttgctgagcgcccgtttctcacacggggagcctcatttttcaatcacgcccgcgctcaggcttcatctggccacccccccacgtcactccctc

SEQ ID NO: 40836 - DNA, 201 bp, Bos taurus
gccagggcatgttcattcttctaagcagcctcagcgctaagctcaccattagggtggtttttttaattcagatccaaattagcaagtgttattaaagactytcagttatttggctaagaaatggctccctttaggatgaatgctctttattcaacctttcaatgtcagttatcatttttaaagcagcttgacctggaagca

SEQ ID NO: 40837 - DNA, 201 bp, Bos taurus
ctccatccctccctctttcgtcctccccttttttactttttaaaattttgtgttgtttgaagtccagtaaggagtgtatgagatacacatgtaagctgtgsagtgaaagtcatgagcaggacacctgtcgccgcttcactgagtggggtttgtctgggtgcttcctctccctccccagccctgagcaacacacgcacttgg

SEQ ID NO: 40838 - DNA, 201 bp, Bos taurus
cttgtttaaatgggtttaaatgccttacgttttaataagctttgttggtttgtccaactaagactttttctgctgtacacatttttgtcaccatctcttayaatacgtcatagcaaattccacttcaggttgtactgaattagtgtttcctcaactttttggaaaatattctcagcatggccatagtttgtaaacccttga

SEQ ID NO: 40839 - DNA, 201 bp, Bos taurus
cctggcctgagggccctccccgttcggtgatcttccaccacttgcaaccacctcggtggagattcgtccaaaagacagtaactaaagcttcgtacacatgyggcggattgaccgtgcggcccccacccgccgcctgcggggacgagcctcccaaggacgcccgggcctctctaggctgtccatcccacgtgagcacacccc

SEQ ID NO: 40840 - DNA, 201 bp, Bos taurus
cacccctctgagtgccgaggaggctgtgagagacaggaggaagcacgtccttttctgtctcaccctgtttttaatgaagccagaaaagcggagcagccaaygacagtaaattcaggagctcacttgcctggttagtgtaaccaaacaggctccacaggtggtgggacacacggaacgcctgcgtctggaacatcactctgg

SEQ ID NO: 40841 - DNA, 201 bp, Bos taurus
gccggacttccaggctcagatgtggcacgcccctttgactcttgccgcagccctgtgaagctaagtcacgactcacttcctggcagatgtttcaagggccraagtgctagtgtcagtcaccatttgatcccccttctgggtggctaaaaagccagtttaggaggagacaggacggcccagggccctcgcagctgtctggct

SEQ ID NO: 40842 - DNA, 201 bp, Bos taurus
caccctccaaggccagcctcccccagggctctgcaaggggaccggtagatagaggtggacgggcgccctgagactggatggggtagggggcaaagacaccrtgacctggcctcatccataacttacaaatatcactgagccataaaggcaaaaggagaagggggcggcaggggaagagacggttagatagcatcacccact

SEQ ID NO: 40843 - DNA, 201 bp, Bos taurus
tccttggccagtaagaggaggctgaattcaggcagcgcctcctatcagcgaggtctgtgtgtgcatctgatagtctgtgtatgtaggagcccctgatatcyggcctagttaatgtgagacactggccctcgcagagttcttgctgaatggggccatcacggcacccaggccatcccaggctgcggctgcagtcagcaggac

SEQ ID NO: 40844 - DNA, 201 bp, Bos taurus
ctcttcattttccatgagaaaagcgaagccgggcaaaacctaacttcttcggaggagggcttcttttctgtgaaatacccactcagcgtgcagacttggtrgtggagactgtttgtggaagttcctagcactaataaaatttaatttaaaacagtgagcccgctgccttcctgtgacatgtatatgggacttacataatta

SEQ ID NO: 40845 - DNA, 201 bp, Bos taurus
ggcagacgctgggaggacaatctgctctccttgggccgccgcttgaacattcgtatctcgcagaagcaccctcacagacgccctagaaggatgtatgaccraatgtctgggcaccagggccggtcagcttgacactggacagtgagcttcacaccttccaaccgacctggctctgagctgtgtgccctggggtccctctcc

SEQ ID NO: 40846 - DNA, 201 bp, Bos taurus
agcaggaacaaaggccaggcagggcccacagcctgcggacacatggctgttctgagccgggatgtgtgtgccacagctgatgagatggagagactcagagyagagcagagagggcccaccccccgaggcaaagactgggcctcagttcagttcactcgctcagtcacgtctgactctttgcaacctcatggactgcagcac

SEQ ID NO: 40847 - DNA, 201 bp, Bos taurus
gccagtgcccagcgcccccggggacaccagctaggggaccacctcactgaactcggctctgacacttaaccgccgggtcagtgtggccccaaaggatcagrgctccctcgaggcctgccccagcagacccccgtcatgagcatcaggtccccaggccaccacatgtctctccagtgtggccaccatttggggtcccgggct

SEQ ID NO: 40848 - DNA, 201 bp, Bos taurus
gtgttttcctaggacccggaggagacgaggtcaggagcatctttccaggaaagaggaaacagcagccggtgtttgccaatggggaaggccagtggcgctgrtgggggtctctgacggtccctgctgggaagctggggggacgccaagtcccagccatgagcatgatgcctgactcctgccagaggccacccgactcctgcc

SEQ ID NO: 40849 - DNA, 201 bp, Bos taurus
ggtgggtgggtgggatggcctttgctttgggaaggagtggaggccaagaccccaggatgctgctgtgcatggacgacagtgcggggctggcgggacgcccygctctgtcagggctatggccatttcgatgcctttggtcatctgtgggcacgtgccttagaagtgacaacacgctggttctgcctagaggtctgtgtttaa

SEQ ID NO: 40850 - DNA, 201 bp, Bos taurus
gctggagcaggagtctgagcaggcaggcagctccaacaaggggacagctgtccaccccccagtctctgagcaggaaggcagggcccacaggagcacagccrcctgctcgctctgctcctgtccgtccactgtgacttcttctcatccctgggtgtccacggcggggcctgggtcctacagcctcagtgtcaggcccaccga

SEQ ID NO: 40851 - DNA, 201 bp, Bos taurus
cgctgacctctggccctggggccacagccgggcccacctgtctccttctgcttttcctgaaatatccgagtgcattttcgcgtcggacaccctggctcccrctctcactcacggcctcctctgacacggtcctctgtcccctcggcccctgggggttcccttaggggcctcctgtggttgctctcctctctccacccccta

SEQ ID NO: 40852 - DNA, 201 bp, Bos taurus
agaggccagagtgagaccactgccctctccctagacggggccttaagacactcagctctttcactcagttcctctaaggaagcccctctctcgaagccacrtgcagtcagcctggtgcggggcctgggcccggctgggaacgcacgagcacagcctctggctggaaaaggccacttgggaggctggttctggagtggaggc

SEQ ID NO: 40853 - DNA, 201 bp, Bos taurus
tgactcctgggacccccgtgagtgagggcaccctgcgtgtgcgccatgacggtcatttcactgagcatcgcgtcctcaaggcttgtgggcatcgtggcctrtgttgaaatcccttcctctttggggctgagtgatgttccgtgtgtgtggatgggcatctgcttctctgtccatccaaccacggccactgagtcgctgccg

SEQ ID NO: 40854 - DNA, 201 bp, Bos taurus
ttagtctatatcgttggtgacaaacacattttgatataaacattcctcaaaggacattgctggttagaatatcagtactgaatctaaagtatacaaacacrtaaacacacatgcacatacacacttgaaagctacagaaaatgtaccacacttgtggccctgagaaattcttacaacttgaaaatctaagatggtggctca

SEQ ID NO: 40855 - DNA, 201 bp, Bos taurus
atgctgcggttcatggggtcgcaaagagtcagacacaactgagtgactgaactgaactgaactgaggatgcccttgcatggcctcacatgtcctctcacamccttgtttgccctcaaatgctcttacacagtctcacacagccacaaacgtactcccaagccctcacacaaccacacacgccctcacacacccttgcaggc

SEQ ID NO: 40856 - DNA, 201 bp, Bos taurus
gactgctaggaatcagtggtagtgatgacaaaagaaaccaagccctagtgaggacaagagtcagggcccagcgaggaacagaatcagggcccattaaggaycagggtcaggatgtagtagggacaaggatcaggtcctcgtgagcatgaaagtcaggctctaatgatgatgagagtcatgccgtagtgaggaccagattca

SEQ ID NO: 40857 - DNA, 201 bp, Bos taurus
caactgaagcaacttagcagcagctgcagcagcgcaccccagccactgacatctggtgctgccacagcgtggagaccaaaggcaccaatgagggcctctcrccatctgggctaaatccgccccaaaagccacacgtcaacagggaaaccaccggacccacccactgctcagagctaggtctccagggccttgggtaacact

SEQ ID NO: 40858 - DNA, 201 bp, Bos taurus
tccagagtagatcagatgctaactgttttaaggtcacagcccctctctccaaaacaagacaaggaaaaaaatatattctctgctctgagtgtcttgggagygtatggttagtagttacatgccctttgtttcagaggaaagaagtttatgaaaaaaaataattttacaccaatgggagagaatagagctagtatctagagg

SEQ ID NO: 40859 - DNA, 201 bp, Bos taurus
cccggtgggggtgacaggaggggactgtggggggaaagctcacgagggtggggctccgtgaatggatcagtgccctgataagcacctgcaggagcaaacgygtcttggggccacatccacccttggctgcccatgcaccactcggtggcgtcagctgtcctcccagggcaggaacctgacctgccaagccctccctccaag

SEQ ID NO: 40860 - DNA, 201 bp, Bos taurus
atcactagtgatgatcccagggtgggccagcctgctggttgggattgtagattgtagcctagagtcatgtgtctaccttccctagtctaaatccaccatgrgtggttggaacagactggctggcccttatgtgtttccccagctgaggaagtttttaattcagatgagtgggtttccctctgcagacagcagtccagtgtg

SEQ ID NO: 40861 - DNA, 201 bp, Bos taurus
tgtgataaatgcattggcatagggggttatttcagaaaagaacaagcagctctttttttttttcgcttaatattggttaagttctcttcctcatccaacaygtatgttttggtccttgtgtcttggttccatcctttgacttgttttctacatgaaagcaaaatggatacaggcatgccaggtctttatccacataataca

SEQ ID NO: 40862 - DNA, 201 bp, Bos taurus
agttcactgtagctactcttggagccatcggcttctgccggggtgattctggagaaacccggatgtggggaagagcggcccttcccccactgtctgccagrggacgcctcctggagcgtggtgtgcagagttcacgcttcagcagctcagagtagggcggccctgcagctcaggggggcaggtgtatatccatcagtaggc

SEQ ID NO: 40863 - DNA, 201 bp, Bos taurus
cccttgccggccatcaagtccccaccgggccacaaggcgcctgtgtgacgagagcccgtgcgatgaggccagctgctgcctgtggaacctgatgctacgcratgctctgttctttgttgttcaatcgctcagttgcgtccgactctttgtgacctcatgaaccgcagcgcgccatgcttccttgtccttcaccatctcctg

SEQ ID NO: 40864 - DNA, 201 bp, Bos taurus
gtggccccagctcgcagctgtcctgcgggctgactggggtgtgcgccgcgtgctcagcatggggggacggataacctgggcagacagcgtgctgactgacrcgcacggagggccccctgggctgcggggaagctggactagggggccggtagaagatggtcaggcagacgtgcagccctgagcctccgagtgccttcggcc

SEQ ID NO: 40865 - DNA, 201 bp, Bos taurus
aattcatctggagattcaagtgataaagcatgaaccctaggtccctcccaaagctgccccgtgcaacgtggggggacagccatggaccccacatgagtgtratacctgcatctgcacttctctgccctactccctgtcaaggtgcccttgctcccatgtgagcacatttactcaaggagtttgttaaaggtttcagagcct

SEQ ID NO: 40866 - DNA, 201 bp, Bos taurus
cttaaaggatggatggctttgtcagatcagacacctcgctctctaccctaaatagattaatctcactgggggctcttgagacttacacacaacagtagaaygcctatttcctcattgaaaacaatagatgacaaggacatagagaatggacatgcagacacagtggggatggggagggtgggacgaattgagtaggtagaa

SEQ ID NO: 40867 - DNA, 201 bp, Bos taurus
gttggagtttcaatatcaagctctcaaaaataatagaatgaatagacagaaaagtagaagaatatagtagatctgggaagcactaaagctgcactgactcyggtataacagtagaaggacactgggcttcagaaagcaaatgctacttcagtgatttgagaaagttagaacagcttccaagaagtgcctaaccttccttcc

SEQ ID NO: 40868 - DNA, 201 bp, Bos taurus
ctaaccacagactcatggggagatggtccctgtggcattggggggttcgccaaaatgtggatgcagggctcctggaattcacggatgatccagggaaaggragctggtgggtcacagtcaaggggcccagcgggttaggaagtgggtgccatggaggcaagtgaccagaaagcgactcaagcacaggagagtgaggcgtgg

SEQ ID NO: 40869 - DNA, 201 bp, Bos taurus
atcataatggttgttttcatatccctaaatgaagtaagtataattttaaacaagatcacttgtataattactgagctatggcaaccattcatctgtgtgcyaacaggaagaaaaggtaacatcccccatcctcagggttaattagctaatgtaagcattggcttaggacccagtgtccagatgtgaacgatccctcctgac

SEQ ID NO: 40870 - DNA, 201 bp, Bos taurus
agccactggtgaggttgatgctggtgaggcagggccccattgaatagcgagtcttcagaccttgctgtgcctgggatgggcagggagtctggagggggacrggagacctgtgcacatggtcccatttatccaggtctggggaggagatcggaagggtaacagctcttccaaaggccaggcagttggcagtttaaagcggcc

SEQ ID NO: 40871 - DNA, 201 bp, Bos taurus
agatgaagtgcatgaagaatggatccagttttgacaggagcaggagatactaatcacaaaattattctagaataaacacaatgacagtctaagtgagtaamaagaagagactaggaatgtgttatttcttgaagaagctcttaggcaccttgtatgggtgctctcagctaaaagaactgcaacggagaaaaggccagacac

SEQ ID NO: 40872 - DNA, 201 bp, Bos taurus
tggcctcctctcatttgtaaggccatattatcaaccccattcatctatccacatactcacatgcaagaattcactgagaatcaggtaagagacagaacccrtattagggatgaaggcctcatttagaagaaagttaaaaaccacttcacagctatgcaagagacaagaatacaaacaaattatatcaaactcatgaaacag

SEQ ID NO: 40873 - DNA, 201 bp, Bos taurus
ctgagttaagcattgacccctctgggatgctgtgagattatgttacgagtgtctgttctctcactttttttgcccctaaaacatggtcaggcctggcaccrggtcacttgatctcccagactgatgaaggagagagcaggtgagaaggagaccgttgaggggggcgcagtcaaagtgaggctggagttctcagagtctgca

SEQ ID NO: 40874 - DNA, 201 bp, Bos taurus
agaatatatgtgtcatatagagtattatttccctaaaatgccataaacatatacttccctgaaatatttttcttccaaattttttccatggtgactttttwaaataaaaataaagatcatgtataaaatcaagtggttcagttagacatacaccaaacatacacctttgtggtatttataattatgtgaatacaactgttt

SEQ ID NO: 40875 - DNA, 201 bp, Bos taurus
taaatgcaaatttctatatacatattacattaagtaattatccattataaatatcttgcctttcattaaaaacttcaaacgttcatatattcatcttttcraactatagaaccacagtccatgatcatttttcctttttttttgggaaggaacaatagtattaatataatatgttgtactgtagttcccctgtaaatcatt

SEQ ID NO: 40876 - DNA, 201 bp, Bos taurus
ttctttatccaatagagaattgagatagtaaaagaaaacctgagagcatagttgactgttgatgaaatataatcagagatctcattttctactaaaagaaktcgtacacactacttgagtttttgcaaagaactgggcatatcataggctttgcttgcaaagattccagaagtcaagctaataaatgcatatgtagctcta

SEQ ID NO: 40877 - DNA, 201 bp, Bos taurus
gttagaagactatcaaagcatagccacaggaaaatgccctgcattacaaatgtatatatggaattccatgaatgttcattattttattcacaccaaattcyctattcagtgaaatgcttgacttttttattttcataactgttttctataaaaatgtattaaagcactatagatatttactctgaccccaaattttaatac

SEQ ID NO: 40878 - DNA, 201 bp, Bos taurus
gagccaagtataaaactggcccaaatctaagcagaatctcatttttaaaatgaatactaaactaaaactcttaagcatatgaattgcaaagatgcccttayggccacaggtttcatggatggggacagtgcagtggtttggaataaaatagttacatgtgacgtactttgctcatctcatgcacagtttgctggtaacaca

SEQ ID NO: 40879 - DNA, 201 bp, Bos taurus
gactaaaacattgccactcactctcagggcagagttactgaggctaggaacctttgtcttttgcaagtgctgcatcagtgttcatgaagaaatgcaataayatgcagagttttcaggtgtgatcacagactgtcagtatctctctctgatgatacagagaaacagtactgatttaataaatctgtaaccagtattgggtac

SEQ ID NO: 40880 - DNA, 201 bp, Bos taurus
ttcagaaatgtatataccaggaatggagtttattaacaaggaatgtgggagaaaaggaaagtgggagccaggagcaaaggggaagattttgttcttgatcktattaaatatttgtcggtgtggggattgtttattggtttatttgcttgttcatttatgttgatgggaggagagaatgagcatcaagagtttgcagaaaaa

SEQ ID NO: 40881 - DNA, 201 bp, Bos taurus
tcctcccaacatttgaataagggaaaatctagtcaccgagtcaatgaaaactatgctgtgctcaccagtggtactttgtgtatttcacgggaaaccatttmaattacatgaaaaaaaaaaaaaaagaacaagaaaacttgtttcatccaaaatcctttcatcttcctgttcactcactgatttatttggtataaatattga

SEQ ID NO: 40882 - DNA, 201 bp, Bos taurus
tctttaaaatgattctccacacacagtaagccctcaatgatcgttaggttatgattattactgtagtaattcagtgggttgtctctggccatgaagcattmaggcagttcttctcatttaactggaaacactgccaaagctcactctctctcctggttaattacaatagccatccctccacagacacaaggccagggtgat

SEQ ID NO: 40883 - DNA, 201 bp, Bos taurus
tgcattttggtattttctattatctgttgaagtgtttcttttcaaagaatatctatttttatatactgtccccaaatgtgatcttttcagaaggcgtgttrtcatcaaatgcattttcacaaagcataacacattacgggatttgaatggggagggaaaatacatttataaaagcaatacatagttgctgggaatacaaat

SEQ ID NO: 40884 - DNA, 201 bp, Bos taurus
tattgcctgggaaatcccatggacagaggagcctgacgggctaccgtccatggagtcacgagctaccgtccatggagtcacaaagagttggacacaactgrgcaactgagcttgaggacagggctgcacatgaaattcatttaaagaattcgatttgaagtttgttgtttgtagagaccatgaaacatggcatagagaggg

SEQ ID NO: 40885 - DNA, 201 bp, Bos taurus
gaatgaaatggttcagaagtgacaatgtgctgtttcagccattgcttgctagggctccctgaacggccatgtgttttattggaggggccacttggagtcgygtgtgtggacttaccacttggagagggatgagagagcaagagttaggtcctggatgctaatggacttaccacctacaggtggctgtgtgaatgaagccct

SEQ ID NO: 40886 - DNA, 201 bp, Bos taurus
tgtcagggactgtcatttgtattctctacccagaaaggggtcttcagaagattgtaaatgaggtgatggtgctggccaaataccctttgtttggccccttytttgtatccaaaagtaatgaaaatggagcttaatggtacataaataaaaataattacgtagacgatagtggtagtggtgcattacctgaattaatacaca

SEQ ID NO: 40887 - DNA, 201 bp, Bos taurus
ttgccaaagtttttgtctatatctataattatgtttctgtcatttgtaagcaatacaaataaatatcaaacaggtgagcttatttaacagcattaatcttrtaacacaattaacacaacattattaaaactggagatgaatgagcctgattaaagcagcatcagggatttgtagaaatgtagatactattgttttgttttc

SEQ ID NO: 40888 - DNA, 201 bp, Bos taurus
cataaaacaggaaagacaaatgttgccagaaaaaaaaaaaaatctataacaaatgtggagtaaactctgtgaatgaaaatctgctgtatgctggtgtgatygttaaatagaaacccagggtatttgtgtatttgttttgttaatgagcaaatcctgcccatgtacataaaggcaagtttattcccaaagatatggtacaga

SEQ ID NO: 40889 - DNA, 201 bp, Bos taurus
ggggggaatcaaccacccaccaacattcataaaattagaaggaaaaagcagaaagattacttaaagtaaaattattgaatatgttgcatataattcagatytaatttcacaaggacaaaactggattcagagactagggtttagacttttctagcagaaatgatgagaacaggtgttggccaagcttatgatcatagcaaa

SEQ ID NO: 40890 - DNA, 201 bp, Bos taurus
agtgggagggtgtggctggtatatttcttccccaggccctcccaggtgggctaggcggtggccctgtccctctgctaaggccaccatgccctctagatgayctgttctttactgcggtcacttcttacttcctctaggtgtcaacttagacaccagttttcaggcccagggatggttcctcttagcctagctcataacttg

SEQ ID NO: 40891 - DNA, 201 bp, Bos taurus
ttatatttgcatctccattatttagcacaatggttggccatatagaagataatcagtatcaaccgaaaaacagggctcccatgttgcaccaccaccatccmgcattgttctgtgagttacctcttctttctcatatattgtccacgtgtccactgatgtttatggtgttggctctgtccccttggcttaaaaattggatag

SEQ ID NO: 40892 - DNA, 201 bp, Bos taurus
acaactagtgctgggacacctgaaggtaatcgtgtgcacccggccctctgcaaactctaggttgggggtgcttcacacagggctcctttgaaagtgaggartgattggaatcctgtataagaggccactgtcaaagcaaaaaagagaataatatctcccccatgaaagtgagagcagaggcaacctctgccactgactcct

SEQ ID NO: 40893 - DNA, 201 bp, Bos taurus
gctgcgcgggtgcaggagggcctagatactgtgtatgttatcctgttaaacatctttctgcactcaagacattgtttcactatgacacgttcagaagtacstgggccaagctacagaaatcaacactgtttagtgacctaaatgcaaaaaaacaacattcagtacaatttgaacaatgagcccttgtcttggtacatcgca

SEQ ID NO: 40894 - DNA, 201 bp, Bos taurus
tatatcaccataatatgcacacatttgttaatgtatctgtctgtaactgtctgatctcagttgaatgtaagctacatgagggagcatcatctgggtttccrttattgactcagcactcccaacaatgccccaaacacaattgacactcaacagaaatttcttgaggaaataaagctgtatgttgtcgtgttaattaagaag

SEQ ID NO: 40895 - DNA, 201 bp, Bos taurus
cttttaaagtctacattttaaagttatttcaggggcccacttaatcagagtcacagaggccctgtgggttgcctttatctgctccccacttgcattttgtytcagcatttctaggccttgtgtgctgctggcagctcaaatcatggtttgccagcatgcctctgaccaaaagaataactctgggtttgctccatgccatgg

SEQ ID NO: 40896 - DNA, 201 bp, Bos taurus
cttaaagcaactgaaacttgactttactatcattcctaattagccttcttccaaaagctcatattggccctgacatctgacttatgtcctagacccatgayttatgtcatattggccctgacatctgacttatgtcctagacttattaagcctgataccaatatcagtagactccttttttttaatataaactttgtcact

SEQ ID NO: 40897 - DNA, 201 bp, Bos taurus
ccctggagaagggaaaggctacccactccagtattctggcctggagaattccatggactgtacagtccatggggtcacaaagagtcagatacgactgagtractttcacttcacatggttgtttttgtgctacagtggcagaactgaatagtagcgaaagcaaagcatcgctcagtcgtgtccaactcttcgcaaccccat

SEQ ID NO: 40898 - DNA, 201 bp, Bos taurus
gtggagagaaatttattaatctcttgcatttatttttatgtacccagttggggaatgattgatgtcacataagcacttaacaaatgtacagtgatttaccygtgtagatattagagagagtgctttttgaaagaaaattcaacatatttgcttgcattaatattatttatagaacaaaattggaaactgtagctatatata

SEQ ID NO: 40899 - DNA, 201 bp, Bos taurus
ataaagaatggaactatgatccttaaatgaattcaagatatgttattgcctgcaaaattttgttatcttttgttttcactaatatttctatgttacccagwcatttcagattcctaatataaattttttcagtgccaggagttttatctatgtaaacattgagtattgtgtgatatttcattatataagtttaggaaattt

SEQ ID NO: 40900 - DNA, 201 bp, Bos taurus
aaaactcttccagaaaaagaatcttggtaaagacagtgtataacaatagttgagtcacaaaaactcagtatcacgtaaagaaaagaagggatggtttgaakccgttttaggcttcagtcatatgatgcttttcctgttcaaaattaaacagaggtttaggtggctgtttgttggtatgttttgtcctcatcagaacatgac

SEQ ID NO: 40901 - DNA, 201 bp, Bos taurus
accttaagcaattgtaaagttaattgcctgcaagttcctcgtttatatatgtgaattaagtagcttagtagttacctattagatgttaaccaaggggttcrtgtgtagctatttaataaaagatttattaaagtcttgttttattatgaagtctactttggcatggatagctcattagttatgttcccatagctttttact

SEQ ID NO: 40902 - DNA, 201 bp, Bos taurus
gagcgactgaactgaagagaactgaactgaactgatggcagtatagacttcatgaagtcttctaggaagacttcatgaagaaatgttatgtggactagatrttagggtgttggtgagatttcatcaggcagagtttggggaaggcaacccagaaaccaggaattataaggaacaatgtcatggaagtagaataattaagga

SEQ ID NO: 40903 - DNA, 201 bp, Bos taurus
agtggcccatggccaagcaggtgcaatgtgatatgcaagctcagtgctataagtgatctcagctattacataaccatacaaagtcattctttacagaatgmggggcgagagggcctgagagcttgactttcaccatcttggccacgtgctctttccccacagcaacccactccagtcctcttgcctagagaatcccatgga

SEQ ID NO: 40904 - DNA, 201 bp, Bos taurus
gttttaaaccatgtttgcactattcatttttgtctgctgaaatatcaggggattgttttccttcctgtatgtttccaattagaaataactttcagatcttmaaggcaggacattaagtacagcgataatggacttcatatgtaaacagctgagtaaaaacatgtggtctttaaaatacaacagcactgaacagcttggccg

SEQ ID NO: 40905 - DNA, 201 bp, Bos taurus
gtttgccaaataaggtcccactctgaagccctggtggaatgacttcgggggcaccctttgcgccaggggagaatccactctgctttcagccacacccaccrtgctgaaactctgaaaactctgatcccaaccatgcgggacactgaccggaaacgtccatgctcactgagcccacaacaggggctgcctcgggccagagct

SEQ ID NO: 40906 - DNA, 201 bp, Bos taurus
gaaaaatggcctaaaaatatcagatctttattgacacagaataggaaaattgactaaagttcctttatgtccaggactttctcctgttaatcaatagcctrgggatgatcaaattaaggccccacttccctagagggacagtccctgctgtgacaaatctgaccttgttatcagagccaatttgagcactatctggtctaa

SEQ ID NO: 40907 - DNA, 201 bp, Bos taurus
tatgaatccacccctcctccaagtctccacaggactcagaggacccaggacagcctgaaaatcccaggtggatgagtgagcctccagaagacctgaagctrctattcagaaaggccaaaaatcttcttaaaccctaagctaagtacccatagcaactatcttctttatgcttcccagcaatcaatccactcagagtaatat

SEQ ID NO: 40908 - DNA, 201 bp, Bos taurus
gagctgctctctgcaatggggacatgaccccgtggtgctgaaccacacgggcattttcccacctccctggacctctcggcagcctttggtgtggccgcccmttgctacttctggaaacactgttccgcgtgctccctaacgtcatagtccttccctgcagccccttctgcttccatcagcctctgcacccatggtgctcag

SEQ ID NO: 40909 - DNA, 201 bp, Bos taurus
atttttcctacactattaaccccaatgtcagtaaagaaatcacagttctgagaagatagcagtgagtagcactggaatcaaggcccactgggaagtggacygggagtagggtaacagagctgagttctgagagctgttcttccattccagtaacttgggagtaatgactgtggtcccagtggagaatctgagcagagatgt

SEQ ID NO: 40910 - DNA, 201 bp, Bos taurus
tccctttcactttttgcacgtcttctccgtcaccgtccacactgaggccaccaccccgtgctgttggttctacctctgaagcgtctcctgtagcacgcccrcccaccttgcagataggacggccctttgggccactgtagtcaccgcagtggccttctgcagccatgaagccgctcctgctctacaatcctgccttgattc

SEQ ID NO: 40911 - DNA, 201 bp, Bos taurus
tccgcctctcggcgctccccgggctcttccttgctcctccgtgtgttgtatgttggagtgcagcgctgagagccacagctggggtcgggggatggcggggragaggtggctcagacccagacagcagtgttctgtgaaattctgacaagtgagctgtgaggtcagtgcagttgacgctctaagccagctgggaaggtggag

SEQ ID NO: 40912 - DNA, 201 bp, Bos taurus
tctccctttctcaaaaaccttcagcacagaaagaaagtgtgtatgagttttctcaaaagacaagaaagagaatgaatgtaaaataatccaagtcatgcatrtttcaaaacaggaaaactgctgcagaacccacatgtggctttatataaaaggtatgttagcggaggacttaggagggaggtttgttctatatacctcaga

SEQ ID NO: 40913 - DNA, 201 bp, Bos taurus
ttttacaggtgaggaaacagaggcaaagaaggttaaagcaacttcctgtgatagacacagagatgttgcacccggaggcctggtcatgttgcccaccttcraggaacagagaggtcagccttctgccatcagctccttcagggtcagccacaagtgcagcgcacacctggcctgcgagcctgcccttccagggcaacacat

SEQ ID NO: 40914 - DNA, 201 bp, Bos taurus
ccatgcagactcacagccgttcaaggagggtcctcaggacacagcgtgtggtctagaagagagggtgcaagctctggatgggaaggggtgcagctgggggrtggccggaggggcaccttctaaagcacaaggtccaggcaggggcctccttgcccaagtcaaacaaaggctcaaccaacgggacctcatgagctcttagac

SEQ ID NO: 40915 - DNA, 201 bp, Bos taurus
atctcggcccaggggagccaccaggagccatgtcccaacggcagacccctgaccctccactgaggtctgaaggttagccctaaccagaggagtgaagcgcrtggcccagaggcagggacccagaggccagtaaatgtgcacaaagtggacacgagcatatcggctgaaggtctcataagccgcttgaccctcatcctgaaa

SEQ ID NO: 40916 - DNA, 201 bp, Bos taurus
ttaccattttgattttagattccctggctgagctttaattcctgccatagtttatcttccatctctctaaactagctgtgagacttctgtcagtgtggccmgatcaactctgctctattttgattctaagcattgtatcctaatccttagctgtattcccaacacaccctaatattttgcacctaagaaagtagtggtagt

SEQ ID NO: 40917 - DNA, 201 bp, Bos taurus
tagatccgcggaggccagattatgcagagccttgagccttacaggttgtggtacagggtttaacacatctgagaataagtgaagaatggccacatggtttkcagcaggagcctaaagagataaacttgactgtgaacaaagattgcatttctgtgactccagggcagacaggggtgggaaggtcaccaggcctgagctcag

SEQ ID NO: 40918 - DNA, 201 bp, Bos taurus
atgtatatacacacatacatacacacacaaacaattaatggaaacaatctatattctatgcaatattctgccttctagacctactaatgaaaagtcttgcygggtagaaaatgtttaattgatgattttaaactttgagagatatacatccttacccttttgtgattcacccaaagagattttctttaaggattgtataac

SEQ ID NO: 40919 - DNA, 201 bp, Bos taurus
agagtccttcccaaacttaaaggacagtacagcagagaagattccagggctctgcttggtcacagaggtccagggtccactgcctaagcactattttaatygcagattctaattcaaaccactattctgaaagcacggcgtaggtgggaatagaccatactttggcagagaaatttttgcagagggtttgtaagagtccag

SEQ ID NO: 40920 - DNA, 201 bp, Bos taurus
caagagagaggccaagttaaatgattgcaaaatgagcttccatctactctgacactagcttaacatcacaagaattgctccactgtaatatttttatatgmcaggatctaggccatcagcatctttgacaaagaaaatttctgcaacaccagcaaaatgggtttttaacattctaactaaataccatcccagacattcaac

SEQ ID NO: 40921 - DNA, 201 bp, Bos taurus
tttatgttcctattattctatttttgtaactctgttcttggggtccacattgcataccaggagagcaccagcttttccaaaaccttttactacaattaacraggaatctggtgcagtgttaattttgaataaagtgtgtgttgaatgatagcaccagctgacggggaggcattaatgctgtttgatttcatgcaggcaaaa

SEQ ID NO: 40922 - DNA, 201 bp, Bos taurus
gttttcatctccctcaaattcagatgctggaatcctaatccccagggtgatactaggaggtggggcctttgggaggtggttagggcctaatcctggtgagyggaattactgcctctataaaaggtgctgagatcccctcccttctgccacgtgaggttacagtgaacaggccccgcctgtgaataggaaatgggttctcac

SEQ ID NO: 40923 - DNA, 201 bp, Bos taurus
cccattaagcccttgcctatcccagaatgggacgtgcccacttggaaattattttaaggctaattgctcttaggggacatgtggctgtggccaagtttctktagccctcccccttcacactgacatcaccctttcctctggtgtccataaagcacccaccccccaccccctgagacagagatagaggtcaggcctggagcc

SEQ ID NO: 40924 - DNA, 201 bp, Bos taurus
tccctcttttatagtgaaagacaaattggcaatagaccttttgatttaaatgtttctcttttgttctctgtctttattatctctcctggcccaagttcaamcatctcctctagcatctacttctgtgattgggtactgttgttgcaagtaagaactctgggtgtctggtcttatgccaaatagtctcaccagatgtagaac

SEQ ID NO: 40925 - DNA, 201 bp, Bos taurus
ttggaaaaaaggaaagctcggtgtgtgtgtgtgagtgtgtgtgtacacatgtagtttatcagaaaggaaaagccttcttccttgatcagaccgagttcacygcacagccctgacagtggcttaatttacatctgtttcatagaagagaaaaggtgagcagggttgtccaggtgccttccagcacattctctctgctctgca

SEQ ID NO: 40926 - DNA, 201 bp, Bos taurus
acttaattctaatctttcactgcttgtgtccatttactagggtgattttagcattacatatctttctctcctaaaaataaaagtttttttccaaagcctayttaaaaggccctcaggattgcatagatatcaaacagcacattagtatttcacattttagtttaaatgagatagaaacttgcaaaccaaatttcctttaag

SEQ ID NO: 40927 - DNA, 201 bp, Bos taurus
atatgtagtgtgcactgtatcctctcacgtagtaagggggattaagtcttcgatgttagaggtgaattatcttgtcagcagtctctcgggacatgttaagrcccctgggccttgactgcttctccatctgcgacagttttgggagcagtctgactgtcttgcaaaatgcatggtgacccttcaggagccactgttggttct

SEQ ID NO: 40928 - DNA, 201 bp, Bos taurus
cccaaaacacacatacctacatatatatgcctgtgtatatgagtaaaatgtgtctgtgttcatatctttatcaacttctctaccattgggtcaagaaaacrttcaagtttcatttcattcttctactcctgagtggctgggggtgggagataccttttgttataactgggagttgttttccatttctttttattctatttt

SEQ ID NO: 40929 - DNA, 201 bp, Bos taurus
agaaggaaggtatccttccaagggtgctaatccctaaattattgcctaaaaattaccctgttggctcatttccatcttagtgtctacttcaggaggaactyaacatgtaacaaacataaaaatgctcctggcaggagacagaatttccacaaagtgataggattatgattctttgctttttctgcctagagaagatttttc

SEQ ID NO: 40930 - DNA, 201 bp, Bos taurus
catgtccattgagttgacgttatactagatacagtctttgaaaggtgctctcagccagcttgaatacaataattttgaggtaagagagcagaccattatamagaattagagctctgtttcagcaggtcttgtgacagagtcattataatttaacaggacattttcatcagttgcagcagtgactaggatggaaggaatgac

SEQ ID NO: 40931 - DNA, 201 bp, Bos taurus
cccaggggactcattccaggcagacacactgtattgatcctgtttatgacatattctagttgctattggcaaaatacctttcttctgggagtaaaatgacrtgtttacaagcaaaattggaggcataaaagattttcagtaaactccttagggctcattagaattggggtctattttatgcactctggtttgggtagatcc

SEQ ID NO: 40932 - DNA, 201 bp, Bos taurus
tgtaataaatctgaaactgttgaaattaaagtggttatgtctatggaaaacttatttttgaagaaatatttctagttgattcttatgtgccccagtaagcrtcctattaacattttgtccaaagtcatctttggaggaagggattaaatgcatctgctgaagtgcaatggtgatgccaagtgtgggggaccagtgaggcta

SEQ ID NO: 40933 - DNA, 201 bp, Bos taurus
acttctcatctcctccagcttgttctgcttcagacctgaaccccgtggtaggatgagaaaggcagctcctttccttaatttccccagtgggccttttcacmcgcttacactctcacagaattaggaggaggagagaggatggaggagggctaaggagcagggagggtctcactgcttggcctttgcaggacctactggagt

SEQ ID NO: 40934 - DNA, 201 bp, Bos taurus
tttaaggaatggggaggatcctaatacctgagtaaaaatgcccataaagattcaaggagaatgtgcagtttgaatcacactggtccagttttaagaaatgratgatcagtagtgtcaaatgcatgtcaaagtctagaataatgtctgtgagatatatgatagatttggcgattgaaagaacattgatgacttcatgagagc

SEQ ID NO: 40935 - DNA, 201 bp, Bos taurus
gtttactgtccatatgttttttagcattaaatcataaccagtcactgaagccagtagttggaagtgaccatatcacattttaagtttagagttcttcatgygcttgaggtgctcagaataaccacagttatcagtttgagccagaagaattttggaggttctcacgttaagcagatagatgccagaatttcaaaagtcaca

SEQ ID NO: 40936 - DNA, 201 bp, Bos taurus
ctctacccgtcagtgtatttgccctacattgcagctgtttactctgtggattttttttctaaggctgtaattctaccatggggcagagtgtaccaaaacaracagacagggtcacaaccctctgtctaacctttgctatttaaaccaaactcccaaaccttttgaaaatgtaaattgctctggcctgttcactgagaagac

SEQ ID NO: 40937 - DNA, 201 bp, Bos taurus
ttccactgtttccccatcttatttcccatgaagtgatcggaccagatgccatgatcttagtttttctactcagagcaacttttagagctgataattattartatctttcagagcctgtttttaagagtagataacacactgtatgttttttataataaaggaatcacatggtccaatgccatcctgagaaatttttttttt

SEQ ID NO: 40938 - DNA, 201 bp, Bos taurus
ataagacaatcacctctgtaagaaatttctctgtaagaaatacagagctaattactatgtgtcctacagaatgccactgcaaccagacaacttatggaaamacagatctttttttattcatgctgtccctttgataaggataacagcatattatttctggaaaaaagtaaattattgtcttcttcatacttgaagatatac

SEQ ID NO: 40939 - DNA, 201 bp, Bos taurus
aacttgagagtaccactgtgctcagcaataaattatatttgttttaattgtccagagacagaacatgcctaaagacatacacggcatcagtgctctagtaytgctggtagcccttaggataatgaccacttgaatcatttcaagtaaatagtaatctctgtctatatctttctgtccatctctattgataagatacagata

SEQ ID NO: 40940 - DNA, 201 bp, Bos taurus
attcctggcatatttcacgctggactgtattcattattcccatcaactagggctgtctctgctcacaggcttggagtttgcaaccatgacaaaaaccaacyactttcatctactgaataagacccagaaacttgaccagctactactatatttagcagctcaacctcagggagtctttggtcctgcagatttttgaaaaca

SEQ ID NO: 40941 - DNA, 201 bp, Bos taurus
attcacacaaactcagctttgaagtttcactttctgaaatatactggtaaaatctagttcccgaagaaatgtttaacaccaccttactaatcagggcctcracataactaactgttatgttgagttagtaactgtttgcagttacttggaatgaagagtagattgtcatccttgaaagctttactctttggttgaacctga

SEQ ID NO: 40942 - DNA, 201 bp, Bos taurus
aagttattataataactagaaagggcctataattgtagatctccttacagttgtaatctcctctaaattaattttcccctctctgtctgttcagtcctctyggcctctgggccttcccatctcaggtacttagcatttagtgttcccccagcttggaatgcttttctttcaggtattacacacatgtctgtctctcatatc

SEQ ID NO: 40943 - DNA, 201 bp, Bos taurus
aaataacactggttctttcttaatacttttctctctcaaaccttcactgacttgtagaaggcttacctgtgcaaggtgagcccaggatgtagctgacttcrgtatggagcattaactttgatgactcccagtttcatttccatgaaagttactgtagattttccaaacaaaggcattttcaataagggtgaatattagaga

SEQ ID NO: 40944 - DNA, 201 bp, Bos taurus
tgctctgtttgaaaccaagtacaccttttaaactgtctggaagtttgatctattacagatctgagcagattaaactcttttggcccacagtttaaaaaaamattttaaaaactctccaggactggaatctaaatgtaggaaaagtaaggacactgcataaactgtatggaaagattgaggcctctgggtatgaagtctcca

SEQ ID NO: 40945 - DNA, 201 bp, Bos taurus
actttcctatgcacgtgaatcactgaggactttggtgaagtgtggattctgctccattaggtctagggtgggacctgagtcctaacaagcttccaggatgyccaggcctctgatcgtggacaccacttagtgtagccaggccaccagagaatccagccaaagggagagtgggtgtaccacagcccaggcagcctggaccag

SEQ ID NO: 40946 - DNA, 201 bp, Bos taurus
gaagttggagccaaaagtttacaaggtggagggtgggccttgtaggcagaaggcagagcgggtgcttgcacaggcatgaacagtgagagagcacagcatgytgttgcatgtggctgtacacggaggctggggtgatgaagggccagagtatgaaggggcctggccttgtgccctgaaagtctggtttaggatgcagatttc

SEQ ID NO: 40947 - DNA, 201 bp, Bos taurus
gatagttttggattaaaaccaagatctttacctcaaatcatttcttttcactgctacttatccttgaagtgaaagacagtttaaacttttgctgcctttayaagcagggagagaaacatctggaggagctatagtctttcttgtcactggctgtgcacttggagtgcaggtgtgtgcggaagagggcagcaaggatagata

SEQ ID NO: 40948 - DNA, 201 bp, Bos taurus
tctattaagtacaacgataacagaagaaaacaatgaaacaaatggataccaaagatgaagcagagcctgttaaccaggcacgggccagagaaacctgccaygctggcaatacaaggttctttaccaacggagccgtggcgcgtgtgctttcccccgcaaggatgatggtgctggcacagaaagtgcaggggccagggccta

SEQ ID NO: 40949 - DNA, 201 bp, Bos taurus
tgagattccagccagtgatgaaggcccacagttctccaacagtaacgtaagtgtacaagtaggcagacccagtcttgggaactcgggccccaaattccgcrtagcaaagccctgccatcacagaagccagtgcagcaatgagaaaggagaccacgatgctggggccagaatctgctttggccacctccccggccagcacgt

SEQ ID NO: 40950 - DNA, 201 bp, Bos taurus
ccacaccatgacagacttcaaattgcagtttggggcactcaggcttataatcccaggctgaaagctggtatcgtcatcagtttgtaagcaaaaatgcaggkttttttttaacttttacaatgctgtttgtttcaccttgtgagttgcaggattttattagcccctgggagactggacagacctctaggagctcaagaattc

SEQ ID NO: 40951 - DNA, 201 bp, Bos taurus
gatctgggtcaaagattatctatgtttttaacttaactttgctttataaactttgatttttgtaaagtattaatatcctcccaatactgcattgtggcccmaaaactgatacttttctggtggcaagttctctgcctgggctttagccctcctgccgtttgtgggcagagggagagaacggtcagcgaatatagatgtcta

SEQ ID NO: 40952 - DNA, 201 bp, Bos taurus
atcatgactctacaatcaacaaaggaacttttttagagtaaaggaacataaaaagaaggaagaccctggcatgaggtttctattctttaagagcacaagaktagtttacttgctttccctaaaaataaatctgagctgtccttcaatttaaacatatatgaattatgatcagacttacctgtcagatgatctctattccaa

SEQ ID NO: 40953 - DNA, 201 bp, Bos taurus
taataattaactgccctgaaatgacggactacaagttatgatgtgtgtcatctgcacttcactcggtaatattagcaaatctccaaatgttagccacattygtttgtttcccttgtatgttgtttattcatgatacttcaatgctgtaactgggtggtcctttttaaacatttgcgaaacagagggattatttgtttttaa

SEQ ID NO: 40954 - DNA, 201 bp, Bos taurus
ctgaagtggttcattcatgtgtccttccagattctcagtgtttgagattcagaagaacgtctaggcaaaatgacaaattccacgcctccttggccttttamagtcaataggaaatagatgaaactatgaatgtaaaatccaaggacctaaagggtcttggatatttttggatattcagttcatacacacatctgtctcaga

SEQ ID NO: 40955 - DNA, 201 bp, Bos taurus
catcctcctccctccaccttttcgtagctagaaagtgtccaactggcaatgttcaaatcgtaaaggcagcaaaaacggccctgcgtgctgtcacaaatgtstaaaaagtggattagggatcaccagggagggacagctcggacacccgaggcccccgtcctccgcgcggggctggcgcagctcggctccctgcccagcccg

SEQ ID NO: 40956 - DNA, 201 bp, Bos taurus
gcatctccctcaaagaagttttgcatttttttctgccggctttatcagtttgtttttttttttcacccagggtaatagaagtgctaactctaaacccatakgaggcagtgttgttgtttatttgctaagtcatgtccaactcttttttttttttttttaattaatttttttttttttttttaattttattttacatgtcca

SEQ ID NO: 40957 - DNA, 201 bp, Bos taurus
aaatgttcctttgatgttctctgaagtcattgttaaggaatggcaaaattcaaatgattttctgcaagtcacgcttatgagcgtaataagagtttgaaggsatgtatagcagtctccagttttccagcctcagttttcattctgagaccatttctaatgtgcttacaaatttaatccctcataatgttttattataatatt

SEQ ID NO: 40958 - DNA, 201 bp, Bos taurus
tgggtatcaatagtaacctcatgttgtcataaggattaagtgacgcatgatgtagataataaagcacttagttgcctggtccacagtaaacacccaaataraagttcatcaatagacaaattattgtttcactttttttctagtacagtgtcatttcaaaaaggcttgtgtgtggagaagctatttcaaggtcaggattaa

SEQ ID NO: 40959 - DNA, 201 bp, Bos taurus
tgaaatgtacatagaacagaagttcattactcctttagagttctctatttagagttctctaaaatatagaatgtctttatttttccctttgaattttgcayatagtgtgaatgtcacagaaatatttcagtttatagctgatatagtcttatcaaaatacatctgatttagttgaagaaaattataaacaacttgaaagga

SEQ ID NO: 40960 - DNA, 201 bp, Bos taurus
ttattctgattaaccaatctccaggaatgctacaaaacctaagtattaaatctgttccctccagcttcagtttattgttaccctgtccctggttctgcagyttttcatgtggcactagtggtaaagaacccacctgccaatgtaagagacaaaggagacacgggttccatccctgggtttggaagatcccctggaggagaa

SEQ ID NO: 40961 - DNA, 201 bp, Bos taurus
atgcttgaatctgccctttggaactcagagaaggcctaggagactaaaccttttttctacaaacacgaaatggggaacatggaaagggttttgttcctggrtgggccccagagagtcctgtttagtttcataacctcaagtaattcctccaaaacagggattgtttacattattcaaatgggactggaaaccctagtgtcc

SEQ ID NO: 40962 - DNA, 201 bp, Bos taurus
ctttccctgcttcagccggtgtccaagaaggttgacagctagggactgtcttgccacctggattccagttggattggccagtggtaaacataggccggtcrgaggagaggatgagagagacattgggatacgttttcctggtcatgatttcatctggttgtactcctggcaggggccatcacctcttctttttttgcaata

SEQ ID NO: 40963 - DNA, 201 bp, Bos taurus
actattacacagagtaaaagcctaagactgaacaacagccccaagtgcctatcagttctctgatctcaccttcttgcttctctttccatcatatctgcttytgtctatggctttcttaatgcttcttgaacatattatgtgtgttctcatcttaggacttttagtcctaagatgggctgttccttcttcatgaactttttt

SEQ ID NO: 40964 - DNA, 201 bp, Bos taurus
aaaaatctagaatggtctgtctttctgtgtcactggtttggcctactctgccattaaggatggacttctggcaaccttcttctgatttcttgagtccaacyactttactattactaatagggccatggtgagacatctgaccccagagggcccaattaaattcttcctccagggtatatggatgaaataactggacttcaa

SEQ ID NO: 40965 - DNA, 201 bp, Bos taurus
tgggatgagaaagtcaagtgggccgtatcacaggcagttttgtggaaaatggcaggaaatggctgtactaggttgttacgggcttgggatgcaaaggcaamggttttggcctgtagcacacaggaagttagtggagacccagggaggagatgaaataaagagcatcttgaacatggcaggaggtttaacttgggaaaatgc

SEQ ID NO: 40966 - DNA, 201 bp, Bos taurus
tggatcaatcccaatcccccaatccatcccatctccattccttccttgaactaattttaaagtctaagcagtatagtttgaccaacttacatgaaattttytgcctttagtgaacttataacttttgggcttgaaccttggttagtttgtaagtaaatggtaaacagtgattgatttaatttattgcttagaaatattatg

SEQ ID NO: 40967 - DNA, 201 bp, Bos taurus
cacagtgttcacctacagagaatcatacaaatgaagatgccatctctaagaaagtgggtaaaatctctgtaaactgcacctctggccatgtacaaagccaktgtgattattgcccaatatcgatgccctggggacctgataccatgcctatcctttggcctccatggtattggtctgtgtacagaatggctgggccatttc

SEQ ID NO: 40968 - DNA, 201 bp, Bos taurus
caaatgtctgcaaactgttataactatatgaccatatgctatgtggttattacacttcatgcaaactgtaacattaaattacagataaaacatcaattatrtatttctgtgcacagttgctatttttatgacaataggtgaaaaagcagaatctatgaaatcttggattcatgcaatgtttcctgtctatgtattggcaac

SEQ ID NO: 40969 - DNA, 201 bp, Bos taurus
gtatgatccctaattcctgccactctagtcttaatcagtggtggaaaaatcatctcagaactattgtctcaattggccatttaaatttaatagtaaaagamcagttaatgataactgcattctgaaaccttcagaagaaaagagaatgttttattggcctttttttttttttttttcttttttctgtgttgcaatgttaaa

SEQ ID NO: 40970 - DNA, 201 bp, Bos taurus
atgaactagttaccagaaggctacaaccaggatattgaagtacctgctgtgtaatgtatttaaacactgtaaattatatgatttctgatttctcacactcsttcaactgatatatgtgagtgtgaattgcatgatatgtgggctgatttctcatgaagaagaaagtagaggagaaagtactattattatagcatcaattca

SEQ ID NO: 40971 - DNA, 201 bp, Bos taurus
gcctcacaaattgaatttggaagtattccttctgctgctgtatactgaaagagactctagaaaaaatcagtattatttcttctgtaaatgtttggtagaamtgaccagtgaaccctctgggccaggggctttctgtttgggaagtttaataattatcatttaatttccttaatagatagaaacctattcaggttgactatt

SEQ ID NO: 40972 - DNA, 201 bp, Bos taurus
atattataagaatttacatagaaattgtaattatttcattatgtataagtaaaataaaccagaattagaaggagcattttcttcattgcctcatttcagcrtactgtctcatttcatttattgattcttttctaatccttacatgaaatttcagtatgtttttaatttgagggtgttagtcttgccttactcttcctcaaa

SEQ ID NO: 40973 - DNA, 201 bp, Bos taurus
attcacaagtgagatattatttagtaagaattaagttttgcatattctatttgcattcacagagagaaaatcttaataaatatgccaaacccttttagaayaggatttttcttttactggctaatgaatccaaattttattcctttattcatgaatcattttgaagaaatttgctaaaattggaagttacttgtctcttca

SEQ ID NO: 40974 - DNA, 201 bp, Bos taurus
tttcttttgaggtcaaagcagagggtagaggctaggactactgaatctcttgcctttcctcttctgctaatcccagcctcccagaatgtatagaatacatmtttccaacctacagacctactcattatctaggagtttctcctttgtttttatatacttttttttcccacatagaacttgttctcccatcatgataaagtc

SEQ ID NO: 40975 - DNA, 201 bp, Bos taurus
gtgtacacagattatttacttcagtatcaggggccttacatgacatctcagccaaacccagtctgcaaaagaacagtactaattgccaggtcatggaataragggagataagccatcagaggccattatttatgatggtccagatctgaaaactacattagctctttttgcttaagattcatttcatattatgtatctatt

SEQ ID NO: 40976 - DNA, 201 bp, Bos taurus
aaattatagaatgggtaatatgtttaatgagtttatttagttgtaaacgaagctgtaaaaataatttgttaaactctcctccctttggccttggcaggcasttaacattttgcttaaacagtaaaagaagtctattgaagagcaaaggaaacctcaagttgcttaaggccagcagcactctttgggcccatgtttctccac

SEQ ID NO: 40977 - DNA, 201 bp, Bos taurus
taaatgaatccaacatagtaaacctctatagtcatgtaaaacatcaaacacaagggtatttaatatttcgtatgataatcttctgtcccatgggttagtaygaatcatattttattctggatatggaggatgttttgcagaaagttttaccagctttcaattcagttcagttcagtcactcagtcatgtccgactctttgc

SEQ ID NO: 40978 - DNA, 201 bp, Bos taurus
tgttctccactatggtgtattaaataaagcagctcataaagtgtaaataaaatgcgtaagtgcattaacagtcttctcaaatgctttttaaaggtaaaacyttttgtaatcagtattaactaatttctgtaagagcctgatgcagtatgaattcatttgatgttaatataggtgccattttcttctggagggcagtgataa

SEQ ID NO: 40979 - DNA, 201 bp, Bos taurus
atttgaaagttcgaactgtctttagtgtcaacctcttcaatttccagcagatggcgccataacaacacgccaggaaacgtgaacggcctaacaggatgccmagcttgtttaaggtcaggagtaaaaggctgtttgcttactaaatgaaaaatcaatttgagaaatgccattctgtcacgatataaggatgattttggccaa

SEQ ID NO: 40980 - DNA, 201 bp, Bos taurus
ctgtttgatggttagtgtccggtcggtactgttcagagttcgtttccttgcccttgaggttgtggatccattttctgctcaatttctttacattagctttkaagtccgaaagctcagattggttgtctccatattccgagcgggaaggcagcgatccactctcagacttgctcccagaggcataagaccagggctgcagta

SEQ ID NO: 40981 - DNA, 201 bp, Bos taurus
tgggcccatggtttatacagagaaaagctagacatgtagacagagaccctcttcagtgtgctggagagattccccaggcagaaatttgggttaagagttakggccatattgggaaagaagaggcatgtttggtttccttatgcacaagagaaaagcaaacaaacaggtcttaatgatctcagggaattggaggatgagtaa

SEQ ID NO: 40982 - DNA, 201 bp, Bos taurus
ttcatcacgatgctgtgttgtggtgaaaaggtatagaatacgagccctactcccaagacgggcacaataaacattaaacaataaaaaaagggcaatattcytttatttaacaagtatgaataacttcctacttgaagagaggtgaggcccagctctatggccgttaacaaagaaggtgtccctgaagtcctgaggaaagtg

SEQ ID NO: 40983 - DNA, 201 bp, Bos taurus
tgaaagcataccagattctctcccaggttttacatttagatttaattcaaatatagtcacagtgccacatatttagattctagagctgagaacaacatttytgaagttccccctttcggtcacagtccctgtattatatttattatttttgtgaagggacagacagtctgacctttcttccctcagcctgcctagattaag

SEQ ID NO: 40984 - DNA, 201 bp, Bos taurus
ctcctcaggcacctttgtaggcaatgatgattccttctgcagcctgccctctcccaaggaactgtccagcttcagcttcagcatgaagggccacgagaagrctgccaagtccaagacgcacagcctgctgaagcgcatggagagcttaaagctcaagggctcccaccacagcaagcacaaggcgccttccaagctgggtct

SEQ ID NO: 40985 - DNA, 201 bp, Bos taurus
gacagattctgtaacatgaacattattatgctcgttccacagtcaaggaatctaaggcgcccactgcctgttctctgtgctaacaaacgggtaaagaagakaaagagaaacaagtgagcaaataggctgttgtcattataattcatcataacaccactcacagggttcccgcaacaccaagtgtattcaggcctcatcgga

SEQ ID NO: 40986 - DNA, 201 bp, Bos taurus
agggcacggggaaaggggtaggatgggggtccggcccagaggaggggctgggagctgcctcacagaagctgtaggagcttcagtgattgtaagagggctgygggctcggccgacgccagatactggcagcagagccagtcctccagctccaccccgcgccggcggtccaccgccttctcggcgaacttcatcatcatcagg

SEQ ID NO: 40987 - DNA, 201 bp, Bos taurus
cccactctaaccagatttgctatgaacccaaccaaaataatacggcttatttctcccatcatgtgacagttcggctggctccctgccacacattcaacacrtaccctaagtgaaacagtatccatattctattgtggttccaggtaagaaaggaagtacaaggttgccaagagtcagagaagtaccacctcgttagaccca

SEQ ID NO: 40988 - DNA, 201 bp, Bos taurus
ttgactaaccatggatgtttgtctttctctggttggtcccaggttagaagacagatggagaagctgtcagttgtcactcaagttctggccatttggggttkattattatggaagttactgtttggtttcctggattgttgttagagatagcagtctgaccttctgtgcctcccacttcctgggcctgttatggtagataag

SEQ ID NO: 40989 - DNA, 201 bp, Bos taurus
ttgtatttgtttagaaagtggtacagaaaatgtaaactcagacctaaaagccatttgaagttacagctgaagactacaaaccatcactatttctctggccraggtccctcaccctcacacttagggtggagaagataactgctcaccaggatcagcccagtacagacgagtccctgcatctgaaaagctcaggcccacagg

SEQ ID NO: 40990 - DNA, 201 bp, Bos taurus
ctaataaatactgtgacttgtgaatgctgagtgctgacagaagttggaaaatgtgcaattaataataataaaatgatatggtaaattgcgatgacgcatartgctttaaaaattgatactaaaatgatttatttggtggtgtgtgtgtgcatgctccgttatgtctaactctgtgaccccatggtctatagcctaccaggc

SEQ ID NO: 40991 - DNA, 201 bp, Bos taurus
gctgtctcacgatcaagaccccactgaggactattttggcgtttctgcagctgctggcagagcccagatgggtgtaaccacgttgggagagttagtgatartgtaaacagccgactcccgcaaggtaggagggcggaccaggggcgaggcgttttctaaaatcgctaatgttctgtaagaacaaatacacgcggctgagta

SEQ ID NO: 40992 - DNA, 201 bp, Bos taurus
ggatgcaagtgagctgtgttcaccctgcagggcttcctggaagaccaaattgctcaagaattcctcataccctcccgcccgccccggaggaggaaaattcragatcacctaggccaacccttctgttcacagagatgcaaacaggcccaagtaaagcaacctctcaattggccagccatgtaaaagggaaaagccaggtgt

SEQ ID NO: 40993 - DNA, 201 bp, Bos taurus
tagactggagggcagagggcatgaattggtatggaaaacactatagaggtctctgcacatgagattagagacaagtatgggggccgtaggaatggttgggrggaaaggaaaatctgctaaaaaaactacttcgttatcattatcttcattacgatcattgcatcagcaagatgaagtttcatattggccaacaataagcag

SEQ ID NO: 40994 - DNA, 201 bp, Bos taurus
attatcatccctaaggcagagagacaaggaggaaatggaggtaccagagccaatgagagctgaagacggagaaggggccacacggtgggagtcatggaagrggtgaacaatttgctgcctttctgataccttggtactgtctccttggaccaaatccacctgcagccaatcagcaaagggccccaaggattgagtccgtag

SEQ ID NO: 40995 - DNA, 201 bp, Bos taurus
cagtctctgcctccttcctgtccctcatttgcttaacgctggtaattttaatttatatgttaagtcaagtgctaatgtcccaagcttcttatcaaaacttyaagttttgaaaatcaaattttgaaagcaagtactccacataaagtactttatgtggagataaaaagtgggctcagattttttggggggttcactccagct

SEQ ID NO: 40996 - DNA, 201 bp, Bos taurus
tagagtggggtgtgaagctcagtgatgctcttccaaacccgaagagtcaacacgaccaaccttcgctaatgaagtcatcgtgagacctacccaagtgagayagaaggactgggaaatctcagatgaccttgttagataaagtcctttagcattttatagtgccagggcccaaagagaacaaccagagagaggtaaactgtg

SEQ ID NO: 40997 - DNA, 201 bp, Bos taurus
ataactggatccagttctcctttcctgagcctttaaactcactgtcatagagggagaatgttgtgatttcaagatggccagttaacataagtcctttgttyatctgagttttgaatccatcaagagatcaaaaacaagggccaaatgaaaatatcattttagtgataagccagacccagccagtttagaactagaaccaca

SEQ ID NO: 40998 - DNA, 201 bp, Bos taurus
cacagaatggttactttgatgtgagttgttcaaaatcagctctggatccaagcagattgtgtgtttactgcctgcttctggcctgggttactttatacccratcacaacccgcagcgttttcaggtcacaagctctttcaagtgggctcatgagggtctaccttgcttaattctgtgcccgttcttggagagactttacgg

SEQ ID NO: 40999 - DNA, 201 bp, Bos taurus
aatgtatatattaatcttaatgacttaatgcagaccaagaactgacctttgagaagaaaggtgtctcctggatggccactgccatagccactggagaggartaggagattaaacgagaggacagtgggaaggtgcgggaacctgagaagacaggcctcgggctcccaggagaaggacaggaactgagatggaggaggaaag

SEQ ID NO: 41000 - DNA, 201 bp, Bos taurus
ctttgtgaccccatgaactgtagcctaccaggctcctctgtccatgggattctccaggcagtagtcctggagtgaattgccatttccttctccaggggatmttcccaatccagggccattgtttacagactctttacagtctgagccaccagggaatccatttgtctattactttgttacatattggatttttctggtaac

SEQ ID NO: 41001 - DNA, 201 bp, Bos taurus
acaatgtgtgcttaactctggcttacagactgccaagccatgaaaataggagataataatgttatcgagtcaaaaggtaagctacgtttggaactatattrtgagaagtgattacctcctctctctctgtggtgttctgaaaaacagcctaagtgcaaaccacaacgaagccacgtgcttggaaggacggcaggcatggtt

SEQ ID NO: 41002 - DNA, 201 bp, Bos taurus
tggagagggaggcctggcatgctgcgattcatggggttgcaaagagtcggtcacgacttgagtgactgaactgaactgaactccagtgtgtggtgtgccakggcctctgcaggtgactataccagctgcattctggtcactccccaatccccccatcctactggtcacgctgtctcctcagctctaaatgcgcttggctct

SEQ ID NO: 41003 - DNA, 201 bp, Bos taurus
tacaagcagcatagcacacgacacaatgctggactactcaggatgcttttattacaagtgacaggaacctcgctaacaggccaggaaaagagaacgtattmgataaacaaacacagcaggtcacacagcagtgggaggcacaggggaacagctgggcctggggacagctggaaccacggactggaattcagcaggacacag

SEQ ID NO: 41004 - DNA, 201 bp, Bos taurus
aacccactgatcttattcaaatttccctagctttattgatacttatttgtttgcatgcctgtgtgtttattaagttctatacaattttatcatctgaacargctcatatatctgctaccagagtcaaaatactgaatattccaacaccacaaggatgctcctttaaaccacatccacctccttcctgccctaccccacccc

SEQ ID NO: 41005 - DNA, 201 bp, Bos taurus
ggttaggacttgggcttccatggcaggaagcacaggttcaatccctagtccgggaactaagatcctgcaagccacagggtgtggccaaaaaagaaagaaaraaagaagaaaaaaaaaatgctcttcatgagcagactcctcaaagttcgtccagcttctaatacatgcccccaaagccacggccacttgtttggggttggt

SEQ ID NO: 41006 - DNA, 201 bp, Bos taurus
taatgcactcgaatcatcccagaaccatccccctaccctgattcatggagaaactgtcttccagaaaagtggtccctggagccgataaggttggggaccaytgctgtaggagacagctggcagtgggccctttcctagccaccgttagtcaggtaggatgaggcagaaaggggtccagtgagcaagcctggaaactccctg

SEQ ID NO: 41007 - DNA, 201 bp, Bos taurus
ttctttcagggacttctgaggcccctggaattgcacacaacactgtgagcgtgcagttgtgtacatggggtcgagcacacgtgcatttttctgctgaacargacggtggccttaggaggaaggtcagccacgctggatggtccctcgagccagagtcagcgagtcatgggtttccccagtgttcatgacgcatctaagtag

SEQ ID NO: 41008 - DNA, 201 bp, Bos taurus
ggtagctcacagaatcttgggaggactggtgatccatattcagaagttaggcagccagagtcacagtggccaaaaccatggctcggaaatgggccagcgargtcagctttagtgtcatggtgttctgatcacgacagctagaaaccaacaagacaggcactagggctgcagccaggctgtcccttgattttactgccacga

SEQ ID NO: 41009 - DNA, 201 bp, Bos taurus
cttgtcccttgtggacagtctgcggctccaggtgaatcaaggtaaaggagcgagcagggattatgagtcacccaccaggaaggcctttaagtaaaagctcrggattaagacctcacagtggactggcagcgcccaccgagggagcaacagagttgagcaacaataacaatgactccgggagtgagtaagcgctactcacag

SEQ ID NO: 41010 - DNA, 201 bp, Bos taurus
gagaatacattgttcaagggaaaagtacatacaacttttacaacagctccaaacatacttacatttaccaatacatgccaggcctgtggcagataatcagrtgagtatccagtgaatggagaacaatgacagattgattaggctccaacagctgctttgaatcaaataactttggacatggcccacttcaagctaatggtg

SEQ ID NO: 41011 - DNA, 201 bp, Bos taurus
atcaatagttatattaactgtaaatggtctaaaaactccatttaaagaaattgttagaattggtttaaaaatatgacccaaccatatgcagtccacaatayattcactacagatataattatataagttaattaaaaataaaaggatacagacattgtaaagcagttaaattccaagtaaaaaataaataagaattgaaaa

SEQ ID NO: 41012 - DNA, 201 bp, Bos taurus
gataaagagcagtaacaggtgtgaactgagttgctcatggaagtggaagcaaaactactctggtacgctgcaggctttcttccttgagagagggagagtgygagccatgttcccagttcactgtgaatgtggttgttccagcacagtaaaggcagcgtgtgtgagttactggccgtggtgaaaagggaaggcttatccatt

SEQ ID NO: 41013 - DNA, 201 bp, Bos taurus
cctgatgggaagttatcagtgcttctaccaagtctgtctgctcctgttcccacaacatttcctgccagaatcaagccagaatgattccagaatccattgtrtaagactaaagaagagtgtctttctgctcacatttgacagctggtgtcggctttgatgactgaatcagcaaaacagacagaactcacacttttgtcaact

SEQ ID NO: 41014 - DNA, 201 bp, Bos taurus
agactagtttgcgcccagcagggccatcagtgagcccagctgagaccagaaccctccagttgagcccagtcaaaatcgccagtccacagaatcttgggctrcatgaatcaatactgttttaggccaacacatttcggactggtttgtcatatagcagtagataactgacacaaagtctgcaaggtggacaggaagggagaa

SEQ ID NO: 41015 - DNA, 201 bp, Bos taurus
agctctggctccaccagttaaaactgtaagttcatgtgcctctcctgatctgctgaattaaaatcacagaggatgggcctcagaaaccatttttacaaacyaaccaggcaattcttgtgtaactttaacatttgagaagcactgccattgaggatattctgtagggattttcctaggcctgtggaatttgctgttctgtga

SEQ ID NO: 41016 - DNA, 201 bp, Bos taurus
tacgcaactctgagagagaaatatagttattacagtgttgacagtattaaaacaaaatcaagccaattactcaggaggagcccaactctttctctaagtgyggccagggagtattttccctttatcagaaaaagacccaatagagtataaggtgtaatgtgaagtcttaaagctgtatctttcagaatctcttgagtagtc

SEQ ID NO: 41017 - DNA, 201 bp, Bos taurus
attccaacatatagcttccggctaatcacctcgcatcacccccaagaagacactttatagctgagacactggacgcggagaagcttgcttgcaaaaggccrtctagctggtgtttgagcatgaattcagacccacaatctcatcactgtgctgtctccaattacacttcacccattcaattctagcaactcttacttggct

SEQ ID NO: 41018 - DNA, 201 bp, Bos taurus
ggtttgaaagtctttgtgtagttcctttcttggccacagagacctggtcaggccaccttgcctctcactcagatcatccttcagaactagatatggtgctratgtttccaatgggaagcataccacttgacagtttattactatgatgcacatatcttcaggttcttgtgtttatgcagttgtgagaaatcagagcctgat

SEQ ID NO: 41019 - DNA, 201 bp, Bos taurus
ccatctgtgagagatgacaaagtagttagtaaagcttatccttccctggcttccaccgaagcaggtgctttttttttttttccctgtggcctgcactgtcyttgtctgtaaaatgaaggtgctgaatcagatgactattatggtccttttaagtgccaagtttctgtgagtcactttttggttgtgtgtatcaagtagtgc

SEQ ID NO: 41020 - DNA, 201 bp, Bos taurus
aacctggccctgctatggcagcatagtcgttttctaatatgagggacccaccacttaaattttcaaaaccagagatcatgtatcatggtatttgagaaaayctggctttatttgagactgaactaaatatgatactatattccaggattacagagaaagaaaatataagaatacagagacgatatgatgactaaaatttag

SEQ ID NO: 41021 - DNA, 201 bp, Bos taurus
gatgtaagtaacagtatttttcatatgggtgtatcattatataaggttcataagaatccttcaagctaatctcagagttgcttcagagtcagttactaatkgtcaaacatgccatccggacccaccagctttgctttgacactagaatgaagatatttaccccagtatccactttacgtgaccgcctctacatcggtcata

SEQ ID NO: 41022 - DNA, 201 bp, Bos taurus
taaaggtctatgttcaccattcaaaacctacctggcctgaaaggatgatagactctagtgcttttccagaagagggcaatttgttttctgtttgtagtctrttgtgctgttggtaaatcctaggtttttctcttatgcacataagtcaaaggaggaggaatttgcttctggttcaataagtatttctcctggaaggtagga

SEQ ID NO: 41023 - DNA, 201 bp, Bos taurus
gtatttccttgtccttggcccactgtttactacccctagcccaagttaaattgtcttgtcccagctccacattttatcattctttgtttggaaagtctatragatttggggccctacagcttcttcaggtcttcattttccttttttaagactctcttgtccatgtaaaaaatattaaataaaatgtgcatgcttttctct

SEQ ID NO: 41024 - DNA, 201 bp, Bos taurus
gtttgatccccttgtagtccaagggactctctagagtcttgtccaacaccacagtccaaaagcatccattctttagcagtcagtcttctttaagggccaamtttcacatccatacatagctactggaaacccatagatttgactagacagactttgtcagcaaagtaatgtctctgttttttaatatgctgtctatttagg

SEQ ID NO: 41025 - DNA, 201 bp, Bos taurus
tccccacaatggcaaacccaacacaggaaaggatttgaattctgccaagaatcagccaggtccccaagcatcgcagccattcctgagcccaggacagaagrtactcttggtggccactgctctgcaagtctccaggtggctcctatcagccttgtgtgtgtgtctctctctcttttttttttttttaattatggtaaaata

SEQ ID NO: 41026 - DNA, 201 bp, Bos taurus
ccttgctaagaatctaacttctgaacatgtcagagtggaaaaacaggaacctgggggaaataaataaaatagctgttttaagacattgggccagtgttggragggctgtgggtccccaagagatgtgaggctgccattttcccagttttctgccacagccaatgcaaatggtccttggcgatgaggccaggactaggctgg

SEQ ID NO: 41027 - DNA, 201 bp, Bos taurus
aggcacctccatagcaagtcttcctttgtcatcttttgatcataatccctcatcccaccccttgtggctttcccactccatgggggccaaagatggctggkgagacactgcatttagggagaatgacccatgacccctcctctttttgctatgcagtgtcactgttaaagcagtaagcactgccttaagtgtaaagcacat

SEQ ID NO: 41028 - DNA, 201 bp, Bos taurus
cttaatttatagggaacctcatgaaattccgtgagggcggatgttgtcccccaggtctctgtggtcctggccattgtggggccctgagtcctgattggacrgcggctcagcccatgatgtcattgcagtgttttagctggatgtcagccttgcaggccagctaatcaggaccaaaaacccggccagtgtcttcatgcagaa

SEQ ID NO: 41029 - DNA, 201 bp, Bos taurus
caacattggagaaatacaagaccacaagcataaaggaaaaaggccccatgagaaggcagtacgtcttttttgggaccagtgtggttaaaaatgacagtcastaaccttgtttacaaataactaggcccatttaaaagcactgtggatagggataattccaaaacaagcatccagcccaaggatctgagtggtacacatgca

SEQ ID NO: 41030 - DNA, 201 bp, Bos taurus
tgagattggacttccaatgattacccaccctcggcgatgtcctcggggtgcttctgtgagattgagcttctcctatgggggcctcagtggggcacaggggkcagggttccagttttctgggtgcagctgggctcccaggaggtgtgtgacaaaggccttgtttcccagctgccatgatggagatttgctacatcccaacat

SEQ ID NO: 41031 - DNA, 201 bp, Bos taurus
gacacatgagatggtgtttctaagatgaaaaggctggtgaacagcagcggtaggagcagaacctagccctgcaaccaccctggcaggcctggcaaggggaygcttcctgtgcgctgcagtgtctaaccttgggctctgcagagcaatatcctcacttcgctgacagggtggcagaaagggaggctgagaggagtcccagca

SEQ ID NO: 41032 - DNA, 201 bp, Bos taurus
ctggtcacagggccattcattcacctctgcccttgggcaggggtatctctccttagcctgaagttagagatgtcagggccctgggtgagcagcagacccargagcacactccccattctgaacccccataatgcccattcccaccgtaaccagacaacctaccaggtgaccttccttccccctgctggcctggactcagcg

SEQ ID NO: 41033 - DNA, 201 bp, Bos taurus
aatgacaaccccacagggaataaactttaaaagctacaaaactcgggaggatttacaaaggagaggatctgtaaagagatttctttggagagagctgctgyctttttgtaagcacctcccaccccccaccaccaccacttttcaaggagagggcatcaagagtgtcacttgctctccctcacctaaggagagccagcttca

SEQ ID NO: 41034 - DNA, 201 bp, Bos taurus
tgtggtgaaggaaaatgcatttattgcaggtgccaaacaagaaatgttggcagctaatgcttaaaaaaccttaattccccagtgggtttcagggaagggtytttacaggccaggtgagggaggggcttcagggtgtgtaatcagctcatgcacgatcttttggttgttggaggggtgacaaggtggtgtcacaaacacctt

SEQ ID NO: 41035 - DNA, 201 bp, Bos taurus
cctgacctggaagcagtggcatcctgtaggttccagcagcacattctctggataccatagcttcatgctctaggactacccctgttgggttgccttggtcmttctcttgaggcaggctggctattgtggatggtctcctaggcattgcttggccttggtccctttgattgccaagtcctgccttcttgctgatgggtgggg

SEQ ID NO: 41036 - DNA, 201 bp, Bos taurus
gggtgggtgttttgttccattcagacttggccaaagaaatcagccttgaagtggctctgggcacaagctcctcagagcccatatcattccacatccagccrgagagctgggccacaactgctggctccactaggaaacagtggccattcaggtgtcgtgtggaaatgtgtctggttgaactaataatcatatggatatgat

SEQ ID NO: 41037 - DNA, 201 bp, Bos taurus
gggctgaggcatccaagggctcccagtgccttgtccactcccaggtcaccgggcatcctcctttatctggacactggccgcccaggactacagagttaccrcctcttctgcagctagggtgcttgtgtgaccaggctctcttccagaggggatgggagtgattcgcacaaactctagaatgtgtcctgggagagagaagca

SEQ ID NO: 41038 - DNA, 201 bp, Bos taurus
acatgactgagcagctaacactttcactctccccaggctttggggagcaaaggtgttccctggcaggtctcacacaggctgtttctggaaatctggccaarccagccctcagcccctggctgctgctcccctggacctgttgctcctccttggaattcacgctactggacagcttgtttttcatacacattttgctttatc

SEQ ID NO: 41039 - DNA, 201 bp, Bos taurus
gcgttggcaggcatattctttactagggccacctttggaagcctaaaacaaaggataagctagtccaaaatgtcagtactgctgaggctgagaaagcctargatagaggaactgtacagacatttgtcaagaataatctggtactattccaccaaaccgagtgtcccctattctgggactctgctgttcccctccagaaca

SEQ ID NO: 41040 - DNA, 201 bp, Bos taurus
tcactttcaatgctttagtgttataaggcagccctattcatctgtcactgcttctcaattcctcatcaacagttacaaagttcaggaaagatggtcatatycttattttgaagagccagacataagcccagctctgtttgggacatttagtcctagatgggaaagtggcggggggagaccaaatgtctggcctgaacatgg

SEQ ID NO: 41041 - DNA, 201 bp, Bos taurus
tggaaattcagagaatacagaatataaaagttgaaaaaagtctcagtaaatgggttgaatagccaagtggattcagttaaagaaccaattagtgagccagrcaactattcaaatactctgaaggcctgaggagcagacagagagaaggaaaaaaaaacagaagctaagcaaggtacagaatagagttatttgatcagtgtt

SEQ ID NO: 41042 - DNA, 201 bp, Bos taurus
ggaggactgggagcccaggagaggtgtggacacctggctcctactgcaggcttagcacaggtgaacttggccctgggtggcaccaaaggaagtgggcctgygcaagcttcacaacctttgaggctgctacctgtggacggggctttcctctttgctcgtcaagaactgtgcccctcacttttggctttggggatgaaggaa

SEQ ID NO: 41043 - DNA, 201 bp, Bos taurus
gcttcatttccattccatttacctgtctgcagaccagagggctaagtgatggatatgatgctacacttctgcacaccctagaatggacacaccctgcttgkctgaccttcccatagtgagacgaggatattagctatgactatgtcctcatgcataaagaatgatgctgctacgactgttatttcattctttctgggtaat

SEQ ID NO: 41044 - DNA, 201 bp, Bos taurus
tctcactgtggcttcagcctgggctctggcaggactgggtgtctgggttcccacacccagaagttgggctccagcccagacacatgggagaggtttgctgycaggcccagaccaaaggtgggcatatattaatagttctgacccccagcctctcctggatgactcctgctggtacagagacccatctcctgccctatgcgt

SEQ ID NO: 41045 - DNA, 201 bp, Bos taurus
tgcacatcacaggtgatgaggactgactacccgagcaggcagcgaaagggtggggataagaagagccgatcaggcggccttgcccctctatgggggtgggkggtggtggcagtgaacaccattgctataactcagatacacaggagatcctcagacaggcccccagaatggtctgccctctgcagatcctgcttgttaccc

SEQ ID NO: 41046 - DNA, 201 bp, Bos taurus
tgctcagtgccgatgccagcccctaagagcctcttctcctctttcgctccctggaccactcctggtcacaactgagaccctgggcggtgggcctcagctcygagctgaccacacaagcagacgaggacagtgcacagctgacgacactcatcaccacggagaatgggtgccccaggctgggccccagcatttctggatctg

SEQ ID NO: 41047 - DNA, 201 bp, Bos taurus
gaagagtcaatctcagtttaacttcctcatttgacagacgaggtggaaatgaagtggattccttagtcacgctgaacccagaaagcccttttatgaggagyggtgagggccgaagaagagatttcccttctgtactacttagaaaggaacttcttgggtgattcagtaccccacggagggaatcagggcccagatggcctt

SEQ ID NO: 41048 - DNA, 201 bp, Bos taurus
gccccagtgctctctaacaccagtgtccaggccacagcgatgtctaaatcacgaacacgatgtcagctcagtgttaaaacatatgctacaaactttgagcwaataactggccagtcagaggagtctgttttcactgtgaatcaggtcagtgcaatgagactctcaacccgagacatttcctcacccctcaagtcacactgt

SEQ ID NO: 41049 - DNA, 201 bp, Bos taurus
ggactcctgctggtgccagaacaggaggcccagggtcacatcaggaaggaacagaagcctcaggacacgccacagccctgcagccagccagagggaacacratcatcctcccaggcctctcaggctggttatgtaatgttccacagaatcgtgtaggcctctataaaaacagttgttttcaacgacaaaaatacttccatt

SEQ ID NO: 41050 - DNA, 201 bp, Bos taurus
agacagagaaagaataagggaagagagacaggaacataaagggaacaatgggtgaggagacaacggagggaaatatgagaagagtggccaagaataaaccrtgtaaattcttgccacaaaatctgaaccttcaatctttgatgtggagagaataagaccatattttaagatcaaaaagtaaggcccaaaagacaataaaac

SEQ ID NO: 41051 - DNA, 201 bp, Bos taurus
tctgttttggtgttatgaatagaaattcattaataactccaaatgtatgaagttattttcaccagtgcatatgtctatttggaaatatttatagaatacayattgcattggccaaaaatttcattcgagtttttgcatgttaaggaaccaaggctggagatttaggtgccttatctcttcatgcacacaaaggctattttt

SEQ ID NO: 41052 - DNA, 201 bp, Bos taurus
ggtgaaggacccagcccatttataaaggctgtggccttccccatgtgtcatagtgtgtgattttaattttgcaagaccctggccaggaaagaaagaataaygggtcaacatgacctcctatcttgtttaagtttgaaaaatctatttcaagaagctaagcacaaaatggccttcctcgaagagatttttctgcattagggt

SEQ ID NO: 41053 - DNA, 201 bp, Bos taurus
ttagtcacaaacatgaacagttgagcattctggtcactaacatccatctttatggctagaatacaagggacatgcatcaagctgtcttatttatctctggyggcatttttcatctggtgcacagggctttgtccatgttgtcatattttatttgtctatccatcttgtaaatggttgttccttgttgtcaagcattgccat

SEQ ID NO: 41054 - DNA, 201 bp, Bos taurus
atatgcttgtgaggcgtgcgagaccagggcctggctccactgtcagggagtagtagtgttaaatagtatttaacttgtaagcacccaagggttaatcagartagtccatgggccaggctgggaggaaaggaaggggtcctggtggggaggatgagtgggtggaggtgcataggttataatttgggaagaggttgggggcaa

SEQ ID NO: 41055 - DNA, 201 bp, Bos taurus
tggcctagcatagctgggtgtgagtccagacttcacggaggaattcactctgaaaagcacccagtggacatacgcagagctcgcatgaagagctcaggctrgaagacatggtcagcaggacgaggcagagctgatgtggaggccgggtgtgcccaattgttctttcctcctccctgtagcagccacttcacacacagtatt

SEQ ID NO: 41056 - DNA, 201 bp, Bos taurus
atgcctgtttcatggaccaagagaagtccgcacatcaaataatcttagaaacagcctgccaggcagatggttttaacacacggtgcagaatgtagactcartaatgccagaatagccacgtgattcatataaaacccagcactacagtctatattatctttcaaagagaagcaattgtgttcagcatccaaatgtagaaaa

SEQ ID NO: 41057 - DNA, 201 bp, Bos taurus
agaggagaggtctccaggtggcccccacgcatttctgatttgcagaatcaccaggctttattctgttaagactctactgagagatgacaggctcccacccygaggccaacagctggagcagggaaacagggttacacctgagttattcaaggttggcctttgtggggactagaacagccaacacttggcccctttgtgcta

SEQ ID NO: 41058 - DNA, 201 bp, Bos taurus
ggctcagtcctggactccatcctcaccacaaatgcctggggaagacccctcagacccctgcctacacttgggtctcatccctccctactggatggccaggrctctggattccacattacctggaaccgtctttgttcattccaaaaccatgggctcctccagcggtaagtcatcacaggaaggcctgaggatccacagagc

SEQ ID NO: 41059 - DNA, 201 bp, Bos taurus
atccaagggacagcagcattcaaggcagcagtcttcaaacttaatggtgcacaaaaattacttcaggtattgtttcccaaactctctcacctcttggcatycagagaaatgatcctattgataagaaacctgggatcaatgaatgaagccattcttgtaggaggataaccagcccagagcctgtgactttctttgccacta

SEQ ID NO: 41060 - DNA, 201 bp, Bos taurus
tgacagcaagatatttcaaaatacttaaggacttttgcctgcagctaaaaagaaaaaaaaaaaaaacgcaataagtacacataatggaaatctctccccartggccttttcatttcctctcagcccaggggaaagtatttgactggggagcagaaatagggagggtttgcagccagcagtattaaagggcaagaaaagata

SEQ ID NO: 41061 - DNA, 201 bp, Bos taurus
atgaggaggcctgttgtgatggagatggcccgcatggctgtagtagaaggagggaaggggagaagtgggcactgagatcagagagggaggctgaggcgccrggagagggggcctgttgccctgagtgagatgggagctgctgttggtatggactggcctttgtgtatggggctgtcctcttgtgtgtcaggcttgctttga

SEQ ID NO: 41062 - DNA, 201 bp, Bos taurus
gggtagggccacaaagatcctacactttccctgtctgttttgcagaaccgaacccaaaggggtagctgatcagcgatttgtaaccaggagtctatgtatgraaactggtctgggtgcctgggggcccctgtccccactctgtatacagcgtaactacaagaaggtctttggctggccaccccaccctgaaggtgggccatt

SEQ ID NO: 41063 - DNA, 201 bp, Bos taurus
agaaagcactcataaccatgaagacccagcacagacaaagataaataaacatgcttaattatttaaaaaaaaaaaatccagtggaagtccctacaggactrctaggccccccaaccccacttctttagtgtatgtcaacctgaccttgtatcagtggattaacaaatgggcagttggaggaattccctggttgtccagtga

SEQ ID NO: 41064 - DNA, 201 bp, Bos taurus
agccagcccaggggcgctaacagctggtggaaaactgggccgtgtggacatcagagtctgaggatcacagtgagcagtgtagagtcagtgttttagttggytcaccatccctttactgatatgtactcacaccattctctgatggctcagagggtaaagaatctgcccacgatgcgggagactggagttcgaaccctggat

SEQ ID NO: 41065 - DNA, 201 bp, Bos taurus
acagccgtgtgaggtggatattactgctgtttccatttcacagatgatgaagctgaggcacatcagcagggagtctgtgtaactggcccaggtaaccatcytacccagtgctcggactcaggctcctgagcttgtgtttttaacagcatttttcacctggttcccagcatcattgaagggccattgcaatgtcatgaaaac

SEQ ID NO: 41066 - DNA, 201 bp, Bos taurus
gtcatcctctactttaccaaagtggaatactggagctcttttgatgacattccatggggaaacctttgtggattttcagtcctcttattgagtaagtggcractaccctgccagaatccccagaaagcagggactgacagtgggatccagaaacccatgccctgaaggagaaaagcaagtctattattatcctcaagttct

SEQ ID NO: 41067 - DNA, 201 bp, Bos taurus
aaaggcagactggtcctagaatcccatctggggctgctacatgggcgctgtgctcataaaagtagctaatggacttgagagtggccgctttcaacacagaratgtgactagatcaatcgagcaagcaaagaatcaataaggaaggcagctccctggccaaagtctggcagagagagttccgtgaggacttctgatggaaag

SEQ ID NO: 41068 - DNA, 201 bp, Bos taurus
cagggatggtcctgggttaggggaagtgaagaggacaatgtgcgtgacagaaattctgagaacacagatcattactacacatctcttaaggttcattgtgrttttaaaaatgggtggaggacttgatcctaggttttggaagggcaagcctgactgaggggaagaaggagcaggaggtgaacagggaaaggcaggtcctag

SEQ ID NO: 41069 - DNA, 201 bp, Bos taurus
ccctgtgtgaatttggtaaggaaacccaacactgggtttcagttttcattacacaccggaaacttggcctgagatcactaaaaagttcactgtggtttgtraacctttcaagcagatggagccaggtttctgccatgcgcctgcccccgccgatgccagggggggatttatggggctgagcgggaaccaggtacaattcca

SEQ ID NO: 41070 - DNA, 201 bp, Bos taurus
ggatatccagagcgcctgctgccacgtggctgtgggcttttccaaagttcacccgttggtccatttgcctgggctcccattgctcgaggctactaagaggkgtatctctttctctcaggcccctagggtaccactccagggagcgaaggcccagcaaaagtacaaagagagggaagctcagtgttacaatctttctaggtg

SEQ ID NO: 41071 - DNA, 201 bp, Bos taurus
agattgccttgggtagtatagtcattttaactgaattgattcttcaatccaagaacatggtatatttttctgtgtcatcttcaatgttttctttttctccyaccgcccccagccccaccaccttcagttcctttcatcatcatcatatagtttttagagtacaggttttttgcctcctttactagttttattcctaagtat

SEQ ID NO: 41072 - DNA, 201 bp, Bos taurus
acccctggtgcagtgtcatctgtcactctggagagctgtcctggcaggaaagtatcaaatgcctgcccctggaagcacatctccagggtgataatggcccrcatcaagaccagagtctcttcgttatagtacctcgggtaagatgaattgctccacaggcttgtaccacagcttgttcacctgcacaccacagctcggagg

SEQ ID NO: 41073 - DNA, 201 bp, Bos taurus
aagccaagggctctcccctgactgcctgggttgcagtcccctcctctctactccaggcgtctccttcagcccacagaggcaaggggtcttctccatggcckctgtgttaggatgaccacagaattcacccaacagttcctcccacaaccactgtgaaccggtcttcaccactgcccaggccagcacgcgcaagaaggtggc

SEQ ID NO: 41074 - DNA, 201 bp, Bos taurus
ctttgtcatagcaagtagctggccaaggatgctagcctgagtaacatctctgttcctaggtggggaaggacacagcttgatttccaagccaaggccagcarcccatggagatggcttgtatctcctgctgctcccccatcacccactcacacgagggataatgtgaaatgaggggtgaaacagcctccataagggccttac

SEQ ID NO: 41075 - DNA, 201 bp, Bos taurus
gaggattaaatgagatcatccgcatgatgggcccagaggaagcctgctctttcctccacccggctgccccatgctccctctgccatctggtcctcccaggytggggccctggtgacctgcagacacctgggaaaatcaaggctttgggcatagattagcttgaccacactcctcacttctccttggacacccagggcccat

SEQ ID NO: 41076 - DNA, 201 bp, Bos taurus
gttctggctctgccacaacctattatccaaaagatcacagaattatgctatcatcctcagtacaatgtatttttcaaacattcaccttcatgaaatatggkagggctactacacctgcccctacaccaagtcatgactacatattcttaacttttaggcatttttaaaatatattatcgattctatgctttaagcagtgct

SEQ ID NO: 41077 - DNA, 201 bp, Bos taurus
ccccccgtccggcccccagactcgctcctgcgcttgcgcacttgcccgcctcacgcgtcccgagccccgcccctcgccggtaaggcagcgccagcgtcgcrgtcgtaacgcgtggaggccggagccaatgaggaagagaggaaggcaggccgagctctcggggtggggccggggccggggcccgggctttctcctcgcggc

SEQ ID NO: 41078 - DNA, 201 bp, Bos taurus
tctctctgttttcaaaccttttcatcaccccgaggaccccacagggaggaaggagtcattcttgtttccatttctccaaggccctggcagcagcaactaayatgctttctatctttatagattcacttattctggacatttcatataaaaggaagcatgcaatattgcaggggcccccgaactctgagatctaatgcttga

SEQ ID NO: 41079 - DNA, 201 bp, Bos taurus
gaacaagaaggcagaggaagagggaattctttctttctccttgagctgggacaccaccttctccccttggacatcaggctttcagacttggactcagacgyacacctggttcccaggccttcagatttggactgaaccacaccaccagcctccagcttgcagatggcagactgtgggacttctcaacatctatcaaggagc

SEQ ID NO: 41080 - DNA, 201 bp, Bos taurus
aaatgggtccaggttggggaccagctgactcaccgcctggtggtcaaagaggatggttacatctgtgccattcacaaagtactcaggttggccaaaaagtkcaatcagctttttctgtacgatcttatggaaaatctgaatgaactttctgaccaacctcatatgtatcacagggcttcccaggtggcccagtggtaaaga

SEQ ID NO: 41081 - DNA, 201 bp, Bos taurus
attctctctaaccctttcagatggctctttccttgaacacgggtggcttcctcccaagcatgttctgatcagtatgcactcagatgggaaactcagaagtycagaagatgtccagagccctctccctgtgtgtggtcctctcctctctgatactttatcctatgaatacttgctgccttcttctccctggactctcagctt

SEQ ID NO: 41082 - DNA, 201 bp, Bos taurus
cttgcaaagggggcctcacccaggcctgggtgcatgagatgccccatattaccccccgcccctgaaaccaaagaccaagatgcctccaaaggaagagataktaaggccccactttcctttgtcatcaaataagtgccgtttcattttcatgctctttattttatgggaggagctaacatgaggttgaggccagggtagttc

SEQ ID NO: 41083 - DNA, 201 bp, Bos taurus
agacaccttaagtagactgtcattttaatttgttgaataattctccctccaagacttctgacataatcaggagtggttgctcaggagactgatggcatagytgtcgctgtgatatgtccctccccatcatcctgacagttcttttcacctctctcatagctgtttagatttcagtttcctcatacttggtttaatctctta

SEQ ID NO: 41084 - DNA, 201 bp, Bos taurus
ggacagaggagcctggctgttcataggatcacaatgctttggacatgacttaagtgacttagcgtgcatgcatgcacaagggagtataaagtcctcatatrtaagaataaattagtgctgctaagaccaatgctaataaagaaacaacatttactgggaaatgacttactggcgtcctatggttgaggtcctggaatgtaa

SEQ ID NO: 41085 - DNA, 201 bp, Bos taurus
gggtgactgacttggccagaaagactgtcaggaggatacaaggacatctgagggtcactgacggtttctcactgctgggcttttcataatattccaccccyaaacctctgcctacaaaggcctcatcaccaattacaatgagtgataggtgactccccacctgtcctgggtccccagcacactcactcctcagagcacctt

SEQ ID NO: 41086 - DNA, 201 bp, Bos taurus
ttttttttttttttttttaaacagtcagtattcatttagatttaccagtaagttacactggttagtacctttcattccttcctgcattaccatgcttacaygtgagatcatttttctcctgtctgaagaactttcgtaagatttcttttatcctgagtctactaacgataaatctgctcagtttttgtgtgaaaacatcta

SEQ ID NO: 41087 - DNA, 201 bp, Bos taurus
caccagcaataagagagatactttctgcatgaatgtttttggaggcagaaagataagccaattaaacattttgttttctgatgcatatgtaacatttgtayacatggatgatctttttgaaatatgtgacttgctactgtttacagtgatatttagactgaaatctctcagggctggagcccagattttcaaattatttgg

SEQ ID NO: 41088 - DNA, 201 bp, Bos taurus
ggcttactttgtttacaccaactgtgttaccggaagaaaagagaaggaagaactattttccaagatacaaatttcatcccttgcccacttgggcctggccytctttccgtcttctctgggagagagggggacccttcccgcctcggttcatacatgcactcatccacatcgctggccccgtgtccccctgtgggcagttgc

SEQ ID NO: 41089 - DNA, 201 bp, Bos taurus
ttagaaaagagctgataatgcttggttgcttttggtgatcagaactttttgcctaagggaaaattcaaattgtggagctgttcctgttttttttttttttycccttaaccttcctttgtgaccttggaataatttaaagactgaaactataggttgaaggtatagtgcatgtataacacccttaggcagttcaaatggaat

SEQ ID NO: 41090 - DNA, 201 bp, Bos taurus
aatactgtctaatagctgctaaatattaggcttcaagcttcctttattgtttcaaaggtgtatttttaccattggttcgtttgaattaggcctcatatgarggtcactgttgtctattcttcacagttggagccattcattgtcacagatcttgcactgttgggtcagttgtaaaaatggccatgtaaaggactataacaa

SEQ ID NO: 41091 - DNA, 201 bp, Bos taurus
gcaaaaagtggggccaccactgcgatctctctctccttatgtgccagcaagggcactgagggagggagtctccttttggagctggctagcatgcccctatyatcacctcttggcccctcccctcctacctggtgacctgcttcacgatcgctgctttggctccctctagactgacaggctcatgggttccaattactactg

SEQ ID NO: 41092 - DNA, 201 bp, Bos taurus
ctgtgtaacagtatgtataatggcttcccaagtcaattgcttcatcccaaacatttgtatatgtttttaactacctcttcactaacgtcactgcacatatraatttgccttttttggctgtaaaattgccatccaattgtgaccgtgtttcacaatgcatatacctgtccttaactggcttttcctatcacctctatcaga

SEQ ID NO: 41093 - DNA, 201 bp, Bos taurus
gagcagacttaactgctttagttcagatgcagcattttaattattgctgtgatccttttgtggaaactaatcatatggccctatatatacccaagacaaayagaaaatacagttgtgtgctcagaaaggagaaatagtttggtgcttaattggccacattatggatgaagtattcttgtttctataaaatacatgcccctt

SEQ ID NO: 41094 - DNA, 201 bp, Bos taurus
ctgaaccctcctccctcctccctccccataccctccctctgggtggtcccagtgcaccagccccaagcatcaaaacagatttctaatttacaaaatgcaamagattaatactgtggaatatgagatttcttttgtatgaacatggtagctcagagctcaaactccacagtaatatggattttgcaaagaaaaaattatttg

SEQ ID NO: 41095 - DNA, 201 bp, Bos taurus
aacagtgatgggcaattgtcatgcagaggtgcaaaacgttcctctccaaaatgtctccgtgccatgtggattgtttgttttcaaaaacaatcaaggcccartatactcaagaagaaactttgatctttcccttaaatacctaaaagaatttggatagaggacctattcccagaatagagctatcaccagaggaatctgcat

SEQ ID NO: 41096 - DNA, 201 bp, Bos taurus
tgaaaattcaccaaaacttgaagcttcatatataggggacctactgtgttgttcacctcacatcctgcatggggtttccttgcattcatgccaaggccatkcttctcccagtttctcccatcaaataaaagaataacagaataacagataaagaataaagataacagataaagaataatagaaatactgtgttggcctatt

SEQ ID NO: 41097 - DNA, 201 bp, Bos taurus
aatattttaataaattctttcttacttctttatgcaaagattacctggataaatacattttctataaccatgaagtaaaattaatgatatattctaaatgratggaaaaacatgatatttcattataatgtgtatggataaggcaattatggccaattaaatataaagatataagcaattcaaaactttttaaacatatca

SEQ ID NO: 41098 - DNA, 201 bp, Bos taurus
aaaaaaaaacttaaaaaaataatgaggttatttttaaaaagaagaaggaagtaaatgaaaatcaaagacttgccctaccagatgtccagacttattctgarattgtcatcatgaagaatttggtactgtcacagagacatacaaattgacaagtggaatacagaacagagaaacagatttgcacatgtgtaaaactgtagt

SEQ ID NO: 41099 - DNA, 201 bp, Bos taurus
gcattacacaaaggtcctttcttcatgaagaaacccaaacctcccctctattgcttgcaacatcggcagacaggctctagagaaaacaccatgctccaggmggagagggactttgtctgtctgcttccaccatcttccattgggcagtgtttgcccacagggagttccagtttgcatttgacaggtcagatgatggaactg

SEQ ID NO: 41100 - DNA, 201 bp, Bos taurus
gtaatctcaatgtttctgtattttcaaaattataaataaccatgcagcaagttctttcttatcttcactaagatttcatgttctgtgtcttgcctgagaawataattcctgaggtttgattgttcaggtttccacttcctggaaccaagaaagaaaatatatttcaaattagaaagacattttaacagagttaataggact

SEQ ID NO: 41101 - DNA, 201 bp, Bos taurus
ccatctgtgtccctgagagcatctcatttcctagggatgcctgctcccctgtatcagttatctccttgcccccctgccactcagcacacctgcccaaccasagctcggggccaagctgagtagcaacacccctgtgggagatctgccctccaaccagtattcaccttgaataaaagaggctgctaggcaggatcccacagt

SEQ ID NO: 41102 - DNA, 201 bp, Bos taurus
tgggatccagctccctgaccagggattgaaccaggctccctgctggaagtgtgtaatcttaaccactgcaccaccaactaagtccccatttcccagtattwaaaaaaaaaaagtgaaattgacgaacagttttcctttacttgtctgtatgtaaatctgcattctgactgcacagagaactcggctgtaatccgtaacttt

SEQ ID NO: 41103 - DNA, 201 bp, Bos taurus
gataacatgattgtctatgtagaaaattccagagaatcagcaacaaaaaattctcctgacactagaaaacagtcacagaaaggttaccgaatatgatgctsaggcaggtcatacaaagaaaggagctatcaagtaacagaggtacagaagaaccttagatgcatatggctaaatgagacaagtcaatcggaaaaggtttta

SEQ ID NO: 41104 - DNA, 201 bp, Bos taurus
agttctttatcttaccatatccctttactctgttgatgtaacacacactctagttgctctcctctgaacttaacttctaaaatacattttaaatgcctacraaatgcatttgaccatgtggaggctaatgcatatttttacgtaatacaactactcaaagactttcagcctcataacagccacaaaataatagaatggaac

SEQ ID NO: 41105 - DNA, 201 bp, Bos taurus
attaagcattattcctgggtgtgtctgtgacggcatgcatggacaagattaggacttaaactggtagactgagtaaagcagattgccctccccaggggggygggcctcataatcagttgaaggcctgaaccaaacaaaaagtggagggaggatctgttgccttcctgcctgtcagattgagctggaatgccagtgttctcc

SEQ ID NO: 41106 - DNA, 201 bp, Bos taurus
aagaggagggaaccagaggagatgacatcagagcccgggcagcggcggcagggggtcggagggagctaacagtccccctttccacccggggccccccaccstgttggaagtcaggctcgcttctcacttactgatgccctgcctgcccttggtgctaagattcggccttttccactctgtgaagttaggtaccgctcatcc

SEQ ID NO: 41107 - DNA, 201 bp, Bos taurus
cctctgttctgagcaaaagttaagattcccatgtggcctgtgaagctttcgaggctgctgctgccccaggctagaggaggcctcagtccacaccggctctmggctgtccacctgcagagctcttgcacactgaggagcagggtgtgtttaaggctggcctagagagctggccgaagtaggggtcgtatcaggaaccatggg

SEQ ID NO: 41108 - DNA, 201 bp, Bos taurus
aaccatcccttgctgtctgccttgactgattctctgtccatgaccctgggacctcacaggacaggggccgtcattgtggcccaggggttcttctctcaggkatccctcctgccactcaggctgctgtttatgggtctatctcaccctctagaacagaagctccgggggcagggctgtgtctgtcctattggccactggcac

SEQ ID NO: 41109 - DNA, 201 bp, Bos taurus
tgatgccccagtggggcctgacttgtctctctgcagacggcggcttcccactgcttaccgtctatctctgggtcttcctgtcacccgcgtccgttcgtgarggcgagtgccagtggccgggctgtgcccgtgtgtacttctccgtcatcaatgcctccttcccagcttgcggcgccctcaaagcccgggagctctgcttcc

SEQ ID NO: 41110 - DNA, 201 bp, Bos taurus
caaccagatccagggagaactctctcttcaaggtagagtctgagggtgacacttggagaaacggaagtggtgacaacaggcgagggcctggcctcccagaygcccccctactccttcttgaacaggggtctggatccccagagacgcccccctcttgccattcccagaacctgtggatctgctcccctctcccctccctga

SEQ ID NO: 41111 - DNA, 201 bp, Bos taurus
gttccatccgtggtcgaggaactaagactgcacaagcctcccagtgcaaaataaaactacaagaaaataccaaggccctcctgaagaaggggaattttatyccacagcatggcaggtagagactgatcaggctgctcctgtttttttgtgtttctaaggaaaggttttggcaaaaagacaagccaagacattccacttctt

SEQ ID NO: 41112 - DNA, 201 bp, Bos taurus
cctcatgcatagaacctcttaggaaattcacggtagaaataatggtagttgacacttgtattttaggatgtagaagacgcttctttgaaaaatgcaacagrtagtgttgcctttgggagatataggatctctctctctcgctcctgaatttacttttaaaatttattttattttattttttactaactactgcctgtttta

SEQ ID NO: 41113 - DNA, 201 bp, Bos taurus
ctttgatttcagttttaggcaggttcacagaaagataatccagtgacctctccccaccccagtgagaaactctgactttagaatgatgctgtggtttacaraaatcccacttgtatagatttgatgttggcacaacacagatttatgtatgtatttaaaatagtggtgtttggggaggaacatgaaaacaaatgcctttag

SEQ ID NO: 41114 - DNA, 201 bp, Bos taurus
tgctctctgcaactagagaaagcccacgtgcagcaatgaagaccaatacagccataaataaatatataataaaaattgctggaaaaaacaattacaaaacrtgtttcaaaatctgacgtagagagttccttgtgaatttttccataaggtggctgtagatgccccccaatcaaactcactagaaacacatctgaagctgac

SEQ ID NO: 41115 - DNA, 201 bp, Bos taurus
aacagtggtcagaggccaggtccggggggccttgtgtgctaataagcaaagatgttgacacaataacatcccgaaagctaaggtgaggtgaggaagggaayacaaagatcagaggcccctgtctaagtgtgtgtcttccaactggctctgtcacatgcagaggaccatggtgacttctctctaggactttggccctagttt

SEQ ID NO: 41116 - DNA, 201 bp, Bos taurus
ctgtcagccttcccactgggctggtgtcagaaggggcccagtggaaaccaggactcttcatcatagccaagggatgataataaggtgctaacccctgcagygccagtgaaggccacacaggaagcagtaataccgtctttctctttcagactttcttcacttagtatggcaatctctaggtccattgatgttgctgcaaat

SEQ ID NO: 41117 - DNA, 201 bp, Bos taurus
actatagagatcccactggctcctgtcaacctctccctagtaacaatgcatttgcctcaagcaaagcagtccacaattactctggtccagggccttccccrcagaggcaccttaatgcccatcactaaggaagaaagagagggtcatgcatcattctgttcacagcctgatctgaaggtcaaaagctctgcctcttgccat

SEQ ID NO: 41118 - DNA, 201 bp, Bos taurus
actaacattgttaagaggaaactgaaatcacagatggatcaggtggttgtagatgaggacctaggtgttctaaatgagtttcaagcagacaaagaacagtkcagggatcccagagaactgctgttggtaacctctgaggaatcagagaagaaaaagtataattatcatcccctttctcacaaaataaaggagtggattcta

SEQ ID NO: 41119 - DNA, 201 bp, Bos taurus
tgacagtggcctaaaggatctccattttccttcatttctcctgtcttgctcagggttcaggtgctttacttaagtgctctctgcttcttttagcaaggctytcaccaggatgtgatgctcaaattattggacccgtaagttttcttttcctatgttatattggacatctaatgccctagctttttttatatatgtatcttt

SEQ ID NO: 41120 - DNA, 201 bp, Bos taurus
caaggtgactttcctctggctcttctgcgaggcccctcctatttctctttggttcctcttctgagatttttccaggaagttccttcagctcctcaactgargattgaatgaaggaggattctttgcattgggacagtgtgagaagcattagagcagtaacatgagggggatgatctttcctgtcttctttaaggtctttat

SEQ ID NO: 41121 - DNA, 201 bp, Bos taurus
gtgggccagtggttaagactctgcacttccactgcaggcagcatgagtttgatctctagtcaggaactaagattctgcacgccacatggcttgggcaaaartagacaggccaacaaaaccaaaaagtgtgtgacccctcttacaaaaagtcataacagcacagtgctgggctggatcctaaactcaccaagccatttctgc

SEQ ID NO: 41122 - DNA, 201 bp, Bos taurus
gtatgtagtactaagactgaaaaaagagctacatagaaaatggaagcttggggaggaagtctggctctccagttctttaagacaccatctggcataggccrggagaggtaagcaacaaagaacacatcactcagctaataaggttttatgaccagccaagcgcacccggggagcaggccggaggttctcagggttccctta

SEQ ID NO: 41123 - DNA, 201 bp, Bos taurus
tgtcctcgcatagagagtttaaaatgtttacatttaatgtaattataaagaaggatttctgtcactttcgtttttatatagcttttgtccgttatttcctycattactgtcatccttttttatttttgtttggttttgtagttaaattcctttcccatttctctagttattttctttgtggttactgttcgttgatttgta

SEQ ID NO: 41124 - DNA, 201 bp, Bos taurus
atctcagtagacgcgtagagcatgatccagatacgtgttcattctgcacatgccaagagtcagaggctgagattgaagaccgttgggccacaggcatgttytgtttggtctatgtaactgttgtggttgtttagctgctcagttgtgtccaactgttttgcgaccccatggactgtggcccgccaggctcctctgtccatg

SEQ ID NO: 41125 - DNA, 201 bp, Bos taurus
agaatgcatgacagagctaggaaggacagaaatacagaagcaggagaagctagtgtgagtgagttcaggagatctgagatgtatgaatttgatctaggaakagacgctctagttaagactcctgtctacacagctagagccccacagcttgaaaaccactcattagacaaagcaatggattgtttccattgctccaaatta

SEQ ID NO: 41126 - DNA, 201 bp, Bos taurus
agggcttacaaggtcctactgtatagaactgggaattatattcaatatcctatgataaaccataatggaaaagaaaatgaaaaaacatacgtcactttgcygcacaaaagaaattaacaacattgttaatcaactatacttcaattttaaaaaaaaatttttaaaaatccataaaatacatgcaaacaaatgattctttca

SEQ ID NO: 41127 - DNA, 201 bp, Bos taurus
ccccttccactgccattctctgtggccaagtatgaaacctgatcactcaattagttaacactctggacacagcattgcgtctaaaaatacccgccttgggraatgtaaaggtttcccctgactcctagtaaggaggcccaaactggtcagaatgtccctaagtattgaaacaaggggtgggtggaggcaaggatggccgat

SEQ ID NO: 41128 - DNA, 201 bp, Bos taurus
agagtctgcagtgtgggttgtcttcatccatcccaacagaggcacccagacaagaccactcaagacaggattcccggcatccccgcttcttgggcctcgcygcctgcccaccacagaggcaacggatgctcctctccatctggctttcctctctctctctgcttgtgggaggatatcctctctttgcagttggaaggagac

SEQ ID NO: 41129 - DNA, 201 bp, Bos taurus
aaaaaccaaaactttgatttttcacaccttctctgctcagaatccttgggagtccttctcaaagcactatggtactctatcacttcatccagtgggcaaaytgcactgacatcctttttattcttaactaaatttacacagttgtaccacctacaccgtattttaccctctgggataatgatacccctaccctaccaatgc

SEQ ID NO: 41130 - DNA, 201 bp, Bos taurus
cacttaaggttacaatggcatatgttttatacagcttgccacaattttaaaaatgggggcggggtgctcttatttaataatatgggcctggtaaagggagygggggcatggttaaaaaaacccactaagcactctatgcaaattagtgatacagatggaaagcaagaagggacatttgcaccacctactggcctttgggat

SEQ ID NO: 41131 - DNA, 201 bp, Bos taurus
tgaaggccctggtttctgacccattccctcaaggagcaacatcctttccctgacactgagtctcagggagaaactcttttctcaaaccttaacaaaaactmatgaatgccatgcttcccaggccactttattacactgccaaataataattaaaattagaattaaagtaacacataataataaacataatgtttcacagtt

SEQ ID NO: 41132 - DNA, 201 bp, Bos taurus
gacaaaactacaagcaaataagctattttctggaaatagaatcttcagagctgagtgaagaactgaatgtctttctctcctcacctacctgtggccctaayagatcttctctggggtcacaggaccagccaacagcagaactgggaccagaggtagttccaccagttcctcttttgaaggactttctattcactatacaag

SEQ ID NO: 41133 - DNA, 201 bp, Bos taurus
ttgtgcttcatccagtctggcaattctcatgatgtactgtacatataagttaaataagcagggtgacaatatacagccttgtcatactcctttcccaattyagctccatagtccacagaatttcaatactctgtagtttccaaaagattttcacttgctaccaagaattaagcatgaattcaaaaatttttaataaaaaaa

SEQ ID NO: 41134 - DNA, 201 bp, Bos taurus
tccattgcagccaagctagcattacctatttcttacggctgccttcccaatcgtcttaagcttagttcaacccaatgtacataagaacgtttcaggccacrcaatttgtccttctctgaatctgtgcagcaaaccgtataaaattttgtttcccttagatttcctggcttctttggggccactgacccccatgaacacagc

SEQ ID NO: 41135 - DNA, 201 bp, Bos taurus
ttattttgcctccatatggaagaacatagcacacaacctatgcagaagttctaccaatagaagacaaaaaagagagaaagatctgaatctgacagaacttytaaatccaactgccaatttaataaaagtagtataaaataaaattcaatgataccaccaaatgccatgaaatcaggggatgcaatcagtaaacaagtgact

SEQ ID NO: 41136 - DNA, 201 bp, Bos taurus
aaaaaaaaatcaacagcttttagtatcattaaattgacctctgaatagaataagcccgagcctccaccacacaacatcccaaaacaggtatggaactgtgrccttaagatgctctgtgtgagtgctgtaacattttaatttacagagaagcagtgattgatggcctctcaaaagcccccctgctcaatactttctatttta

SEQ ID NO: 41137 - DNA, 201 bp, Bos taurus
acatctgtgtggcccatcacgagagcagcctctgacagatggcactgcaccagccatggctaccccagcaggaagagcatcagtaaccatgggaaccaccrgggaccaaggtccaggcccctccaccaaatgggaaggcaggggatagggaggagcccagatacaggcaaacaggagtggcttagggctgaatctgattta

SEQ ID NO: 41138 - DNA, 201 bp, Bos taurus
catgtgggatcttagttccctgacctgggattgagcccatgtcccttgcattggaagcatggagccttaaccactgaaccaccagagaagtcccagtctcrcaggaaactcctctcaatttttttcttctggctcctctacttcctcccctgaagcatgggccttccttcagattctccacctggcagcgatttcattcac

SEQ ID NO: 41139 - DNA, 201 bp, Bos taurus
acgagctgatgagaaatgtgtagggttgtggaaagcaaatcagagaagctgagtgagtgaggagaaaataatggtccgtgtcagcaaagggatggcccagygtgagagatgaaagcctggtgagattttaaactgcccacatgcccattcctgcaggtttccgtgaacaaatagggccacatgtggtcacaccaaaaatat

SEQ ID NO: 41140 - DNA, 201 bp, Bos taurus
tgtggcccagtgctttgttcttctttggaacaccagagagtaagagacctactcacttggcaatgcggtttagcccccatcctactgtacctgggccatgyccaagctcagaaccacattctgcctcaactagggctaacactttagggataggtttgaattgtttgcttcaggccaaagccagtaaatgcattaggaagc

SEQ ID NO: 41141 - DNA, 201 bp, Bos taurus
ggcccagtggttacaactccacgcttccactacagggggcatgggttcaatcccaggttggggaaactaagatcctacatgccatgaggccaaaaaataaktatacaatgaaaataaaattgcctaagtgaggtcttgctgaaactcttgggttgataagtgcccttttctgaactctcataatatctcatgcaaaggcct

SEQ ID NO: 41142 - DNA, 201 bp, Bos taurus
aagggaaagctatgctgagagagtttaagtctttcctttgaaaacatggcaatctgcagtgtttatgcttacagtatggaacctgagatgaagtcagaacktgggaggtgggccttaggtggaaataaaaactctcagttctttctgagccttgattttggaggccttgggttgtgatggagatattcaggagtgcagtgg

SEQ ID NO: 41143 - DNA, 201 bp, Bos taurus
taccacactctcttgattactgtaactttatagtaagtcttgaagacaggtaatgttggtgccagaacaattttgttctcttcaacattatattggttgtkctgggtcttttgcctctccatataaactttataatgcatttttcaatgtccattaataatttgtagggatttttattgtgattgcatttaatatatacat

SEQ ID NO: 41144 - DNA, 201 bp, Bos taurus
ttgacccccacccctggcccccaccatgcagcctacagattggttcacactcacccatgccaaccccttcagagccactgtttggctctgctgagggtgayaagccaaatggcctcatttcccagggtgctctgcagcttaggttcgacatgtgacctgacttcagccatgcagacactgcctgcaggacatcatgaagct

SEQ ID NO: 41145 - DNA, 201 bp, Bos taurus
cacaggaaggtgaagtgatttacccagagtcacacagcagtttagtaacaaggcagggaataaacagaactaaatttctgacattaacgctcctctggcartgttataggttatatgttaatggcctattcagtagctgtttgcacttcacctcatgttctctcatcctgaaagaactaaaaaaattcataacaaaaaaac

SEQ ID NO: 41146 - DNA, 201 bp, Bos taurus
tgtagaatcttggtggctgtataaaatggactcacagtggtgagtgtccttgcacacatgaccatcatgttcagggtctcatctccatccgtgtgcagagrgaaaaagtgggagtagaaaccacatgttgctggtcaatctagtggccctgtaaatgtccccctgcccccccaccgcctttcctttctcatgcctcgagca

SEQ ID NO: 41147 - DNA, 201 bp, Bos taurus
ctacatgtcttctctttgatgtttctgccaaagaagggaagagtatactgagatctgtcccggaacccgaaccatttatgcttaggtcaaagaaaaggctraagctcttggctacaactgtgttgggtgatactggcagatttcattcattcttgctagttataggctgtgctcacacaattaagacagaaatgacaaggt

SEQ ID NO: 41148 - DNA, 201 bp, Bos taurus
ggagcgcacctatctgttctgaagagggggcatttgttttccccgctgcaatgatttcagtctggtttcatcatgttggaatttgatcacaccattttcaracaatgttaacatagtccagcttttgtttttctcatctcttccgagaggagactcactgtttctgtctgaggaagctcataccctcggcaaaacatcagg

SEQ ID NO: 41149 - DNA, 201 bp, Bos taurus
agggaagataatgatagtcacctaaattggaatcttttctagaatcccatgaaaagtttcacatcaacaaggaaagcaaataaaatcatctatggcccaarccaacagcataactggaaaacagacttcaatttacaactgaaaacaacagagccagctcttggaggccttacccaaatggtcaggtattgcaaaacaatt

SEQ ID NO: 41150 - DNA, 201 bp, Bos taurus
ccttgcatacactgctattgcctctcttgaagttttttccctcttttttatactctcatatctttcaaacactccccagacctggccacattgtattcaaycttaaagattcagctcaaatgtcacctttccccaggaatatgtatgtctttgatctcctgccttcatcaatctgggttatatggccttctttgtactact

SEQ ID NO: 41151 - DNA, 201 bp, Bos taurus
gcttatttgtactccagagtcctaaatatacctctatatccccaacgtcctagaattcaccaggaatggttcactttaccagggaaaaccaaaattgcctktatatgcctacagatcagctgtattcatatgggatagcaagatagttctaaacataaggatgttgatccagagttgagcaggatcataatactgcatgtt

SEQ ID NO: 41152 - DNA, 201 bp, Bos taurus
tccacaaaaggccatgcagcaacgaagacccagtacagccataaataaataagtagaattatatatatataaaatcctagcacatttttatagtaagaaayctaaaaaaaaataatgcgatactgaaaaaaagcacctgtaaatatgttgattaataaatatgagacatatggtaagccacagcttaacttaccctcctta

SEQ ID NO: 41153 - DNA, 201 bp, Bos taurus
tcccatctccaccttggcctccctaccctcgctctcctctcccaactcccagggtctccagagaccagagcccaccaccttcctgctgcagcccaagcccrccaggcctcaaccttcccacttgaccataaggctcaagaccgagtttggggacaaaagaataaggtgctgaaaggcatcagtcagtcttgaaattcccaa

SEQ ID NO: 41154 - DNA, 201 bp, Bos taurus
atactttaatgatgtcacctcagtctacatgttcatttccagggcagtctggaaaagacctaggtccaaatgcctttttcctagatcgatctagtggaaaygtctgtgctacatctctattctctttcagtagcacagcatctgcctgactttgggattccacatgctgttacggactaaatcaagcgaagaaagaaatct

SEQ ID NO: 41155 - DNA, 201 bp, Bos taurus
ttgttattgacattttagtatagtttcaagtcactgacctccctctacctctgtatgaagcaagggtctgaacttgggtttagatacagtacatgttacartcagtcatttctaggaaatgagatggtagccccaggcctgatgctgtgctatgtaacaccctctgatcctggttcactgcctacagacctgaggcctgag

SEQ ID NO: 41156 - DNA, 201 bp, Bos taurus
accaagtaactctatgtggccaagcaaaacattttatgattcattcctaaatttaagctggtaatagtttttctgttacatgaagctgaaataatgtaccygattcaagcagatcaactgaagggccacagtaattggtccaaatcaggttagaaaaagtcctctagaacttttgaaagtgagctgtaaagaaaaaaaaat

SEQ ID NO: 41157 - DNA, 201 bp, Bos taurus
aaactatccccccagtgggactgagccactgggcaatggactcagtaggaatcttggctgtctgtcagaacaggatgcccagaggatatattgttgtcaaygaggcccaaaatgggctagcagttaggtgtaatggagataagcaggccaagtgtgtgagcaggaaatatgaagagacacatgtcaatgtggttaatatta

SEQ ID NO: 41158 - DNA, 201 bp, Bos taurus
tgctgtcacactcttgtccgttggcttcacttaccctggatgttcaagcaatagatttgataagtaaacatggtctatctgcttggttcaattgttctgtyagtgatagaattctgcagcaagatgcttgcaatttcctccaagaggatgcagagtcatccacttttattcctagccttaagctcccatttctctgactga

SEQ ID NO: 41159 - DNA, 201 bp, Bos taurus
acagaaatatcctgtaacagcaagtttgaggcatggaaaatgaaactaaggctaattgcttctttttgcagccttgactttgctttttatttatttctctktctgcttaaggaatacaaacaacagaataaatacaaagcttttggtgctgtctttctcagtaggtattgcacttagcagagaaataaaaaattaactcta

SEQ ID NO: 41160 - DNA, 201 bp, Bos taurus
acttcaaattctccctgaaaagttcattgtcaatgatgttgacattcatagaaaatgtttatacataaaatcagtggctgttgaagagacttaaacttctytgaataattgtttagcaataattgctcagcaatgtagtacttaaattttggtaatgatttaggtcataagttactactaaatacaatgcatttaagttcc

SEQ ID NO: 41161 - DNA, 201 bp, Bos taurus
actagaattagcttatccagaggatatgatctagtaataattgagagcctgagtagaacatttggtttaagttgtagcctatagacaagacctggctatgmtgattaagtcactggtaacatgtttccgaagcacagacttagtaaaatgatataatgccttattaaacagtgaaagatacacaaattgaacaatacacat

SEQ ID NO: 41162 - DNA, 201 bp, Bos taurus
ttgattaccttctatatgctgtgcttgcacagagatgatggtatacaaaacaaagtgaggtaatagtaaataggcaaatacatactgaaataagggctgcrtttgagggttaagacagtgaatttggggagcatattggacagggacccaattcaggaaaaagaagaaattccagggccaagtgtcagctaagagctaaag

SEQ ID NO: 41163 - DNA, 201 bp, Bos taurus
tttgtggctgttttccctgttcttcccagcaatccactggaacagaaataatattcaacatttttaatcattttcaaaaagtagagacagtgtgctagacrccttttcccaatttgtttacttagtgtatgattacccaaattgggtgagacctcttggtttccctcatcccagaataaacactaacgtgatttgaagaaa

SEQ ID NO: 41164 - DNA, 201 bp, Bos taurus
tcggtggctgccagggccgccgccgccgccgccatcaggaccagggccgcgtcgggagctttggtcgtcaatttacaacccaagggccctagccatggackgagcaggcagtgacagggcaccgaccgccgcgcgggcggggcggaataccacgggcagcaccgcgcgacgcgggctgattgcgtataccaggggcggggc

SEQ ID NO: 41165 - DNA, 201 bp, Bos taurus
gcattgtcttggacatttctctatatctttgtgtgatttttccatctcaatagcttttctttttcttttttaaataatttatttggctgggacacgtgggrtatttgatctttgtagtagcacagggaatctagttccctgaccagggatcgaaccctagccccctgcaatgggagtcttagccactggaccagcagggaa

SEQ ID NO: 41166 - DNA, 201 bp, Bos taurus
aaaaaaacgtttcaattctcacatacacttttattctgcaataatgcatctgcagttagaattcctatattggtgtttctcctttaagaaaatatacttgytcttttttaaaaaaaattttaagtttcaatctttttgtattaaatacattcatttttggaaactaaatccccccaatacttattgaattaagtccttgta

SEQ ID NO: 41167 - DNA, 201 bp, Bos taurus
taattttgaaccccaccatcctgtaagcttctttcctggtatttgaggacacactcaggaagacaaaacattgtctggtccattggattgccctggggccragagtgctctcaactgctcttagatcaggcagaactctttccctgtttaatgttgagtctcccaccttgcttggggcctgggaaagtgacaagcttactt

SEQ ID NO: 41168 - DNA, 201 bp, Bos taurus
ggtcatatccctgatcaaattcaatccagaggcaggggagatacagctgtgaacccggtgactcaagtcctgcctttttggcccattggaatgaatggtcmcagaacaaatcagtgcagcctgaggaagcacacattcctcatttgtgtttcagggctcccctgcacctcactgtctcctaggcctcatcgcaaagcacct

SEQ ID NO: 41169 - DNA, 201 bp, Bos taurus
tgactgtggcattgcccatcacagccaccagcaccagggccaggtaggctgcggtccacagtgccagctgccagccgggcatggagaaggctgtgatgccygtggcattgctgtcaaggccagacgagatgttgatatcggtcatcacgacacaggcccccatggccgcctctgagtctggcacaagaggtaaggctcctt

SEQ ID NO: 41170 - DNA, 201 bp, Bos taurus
tgcacttgctacgtagcttatctaaaataatcatcatttggaccctctcacactggctccttcccatttttgaagttccaacttcagtttcatctcctcaraaaggccttcctccaccacctaagctaaagcattttcacattttctcgaattccatcctctcttcattacgttaccatattttaacttctctacagcagt

SEQ ID NO: 41171 - DNA, 201 bp, Bos taurus
gactgatgagagtggaatgagcccgcggggtggggtcagccaggggcaccctggcttcctgcccagcataggggtgggggtgagggaggccctgagatggkgatcaagggagtctgggtcacttgcagaattaagagacttgacccagagggaggggaggggcaaaaggtcagccatcctaacgaggagactgcctcctct

SEQ ID NO: 41172 - DNA, 201 bp, Bos taurus
gtcacaccggaaggcggagagggaaggaatgaggcttagcttcctgccacaattctatcccaaaccaagtgggcagtgctgggtctccatagcctggcctrgagatgctgtgaatggaattctctgcatacaactgcgaccactcgccaggatgtcctgggctgggacatgacagctgaccaagaagaattcttatcaggc

SEQ ID NO: 41173 - DNA, 201 bp, Bos taurus
tcaggaccagggctgttgtacggctgtcctgagctcgccagaagggaagggacagagctgagtctactgtcagggggcagagagagaaagcgcccccaaayggcctgcccggtaagaggtccccagcagctaaagagaagtttggtccagactccagagctgagcaaggtgggtagtgaaggggaggcaactgggctctgg

SEQ ID NO: 41174 - DNA, 201 bp, Bos taurus
ctcaggcagcaccagcaggaaccaacagaaaccctactggccgcagataaaccaagctgaccaaaataacactgcaaagctgctgaaaattaaactgccaytgaaaccacagtccacaaaagtaggccaagacccatgtgctaactctaaatagggtgatgcttactaaaaataaaaagatttaaatgggtcctagcatct

SEQ ID NO: 41175 - DNA, 201 bp, Bos taurus
aagcagacactgacatgccctgcaccaagccgctcatcttgcacgtggcgttgtcaaagggccagcctgcaaagacagaggccactacaaagtgagagacrcctcatccacaaagagccagagaccttcatccacaaagagccagagacctccagccacctgggccagtcccctctgtggcttgtatcttccctccagtca

SEQ ID NO: 41176 - DNA, 201 bp, Bos taurus
atttcctgctgaggacagctcagggttagggcagatccccggacctcaaggcccaacttcatggttatcttgccgtgtgaccttgggccaggcactgcctmttggtgcctctggcaacttccaaccctgcccgggggttgggactcagggtttccaggctttcactggcctgacaggtgccctttttcccagggggtctct

SEQ ID NO: 41177 - DNA, 201 bp, Bos taurus
gtggctgagacagatgtttcctgcagctggccactcagcctcctgccctatttttagctccattgttacccgccccaggcatctggctgccagcggtccgwgagaggctgtggccctggaaggggtgctcttccctgggtccagcttgttctctgcctgctgcaggtccctgggttaagcttcccagtgtctttggggaaa

SEQ ID NO: 41178 - DNA, 201 bp, Bos taurus
cagaataaacaggatggaggaaggggctgctggcgaggtgctggaggcctctgactgcagatgctttccaggctgctccgggccccctctgcagttgaaaygcttgctgtttcgttgggaaggctggggttaggtccagcccatcttctggaagagctatgcgctctgggctgtctcagcaggcccgtccccgtgctctgg

SEQ ID NO: 41179 - DNA, 201 bp, Bos taurus
ctggaggccttgccaaaaaacatatcctggaggcttgcagagtgtaaatgtgcacggctggctgtggggctcgctggcctcagctgctaggagttataaaragaacagaagtgccggtggcgttggggtgactaatggtgaccactgggggtgtggccgtcagctgtgagatgatgtgtattccgcctcactcagttccca

SEQ ID NO: 41180 - DNA, 201 bp, Bos taurus
tgcagaccctgcctctgctcattctgttcacacctcccacagggctctccccttccctctgctgaggcatctgccatctgggccacccgcttcccagaackcaagaactgtctgatttctctgcatgctgagcacggggctgggctcatgatacaagggaggtcatgacttcaggagcagggcgtaacacaagaaagagaa

SEQ ID NO: 41181 - DNA, 201 bp, Bos taurus
taaggggaaaccaaggcccagagtggcagcaaggtttgcccaggccccactgcagagaggagacagagcggaaactcagactggatctccaggcaccaagytgaaggcttcttagtgttttctggcctggtgctagaagagggtcagcctgtacccataaaatctgcttgtctgaatccctgaaatccccaaggcgagctt

SEQ ID NO: 41182 - DNA, 201 bp, Bos taurus
ttctgtccctcccagcatccttttacaggtggggaggctgaggcccgatctgtggacccagctttctctccatgatccagggggtccatggaggtgaagargagctcagtgcttccagggccgaggctggggcatgtccaccagttcctctggccagtcatctggggcccaggcacatggcctggcctgccagctcccagc

SEQ ID NO: 41183 - DNA, 201 bp, Bos taurus
tagggtccacagcccccagccttcccagcacctcaccagcagctcctgatcctgtaggacaaaggtctggtctcctccatctctgctcgcaggctggtttyggccctggtgggagtggcggcgggccatggcccaggtagaagcaggaatgagcctgccagtctctgctgagtactttgccccctgttcccgctgaggctc

SEQ ID NO: 41184 - DNA, 201 bp, Bos taurus
agtctgatagctaacatttattaagcacatattacgcattaggtgcagaaatagatactctacatactcatttaattttcctaaaattccttgaaaaataygctggcattctccttttatagatgaaaaaccagacttagcatatcatagcaatgaggtagtagagctttattttaaccacggttagtctgtcttaaaaac

SEQ ID NO: 41185 - DNA, 201 bp, Bos taurus
ctcctctctcagctgggtactttagccaagccattattcacatgacaaacacgtattgagcacctactgtgtgccgggccctgtcccagacattgaaggtrcagtcgtgagcatgacagatccagggatgcctccctgaaggatgcaaaccctgaggcccccaccccatagaaccagccttccaagacacatgggctgagg

SEQ ID NO: 41186 - DNA, 201 bp, Bos taurus
actaaggcaggttactctccttatccaatcccaggatcaaccccgatgcattaacactattctgataaacccaaatccacctgtaccttcattcaagtgaraagcacaggcccttttcaactctgaaaactctagaattcaacgagtggggctcacactagaaatattagtagcacttggaaatatctttgaaatgcagat

SEQ ID NO: 41187 - DNA, 201 bp, Bos taurus
gtcaccaggctgacagagccagaatcccataactatgctcttcactgcagtctcagagttctgccactttagggctaagctccaccgctggcctcaacatycccctctggacaatgggtgtggtacgctctgccctgcccccatcaggatggtcatgaggagctcaggaggcagtggtcctaagagcctcacaggcctccc

SEQ ID NO: 41188 - DNA, 201 bp, Bos taurus
tgtagctcagaggaagagtgtctccaaggccgggatgcaggaaggcttccttgaggaagcaggtatgtgggggcaaatgcggtggagcacagctcagagtygaggcagaggccaaagagccaacatctggacttggggctccggggagctttgtgaacgcatccgctgaggatgccctgacaacttgtgcttgtgtggaca

SEQ ID NO: 41189 - DNA, 201 bp, Bos taurus
ggactcccgagatcggggacacccgcagctccatgccagtggccttgcattttccaggcgtaggtcctggctcttgtcctcatcacccgtgcgcttttgayggttccttagaggcctctggggtgacgtgtgctgccctccatgcttttctccccaaggggaggctcctggggccaggccaggcagagtacacagctgaca

SEQ ID NO: 41190 - DNA, 201 bp, Bos taurus
gatctcaccatgagcattgccaggacctttaaagcaaccccttcctgtgcctgcttggcttgttccctcttcatcaggagtggggccacccctccttcagractgtttcaaagtgagaacattctccagaagagtctgagaagaactttaagagaggggccctgggagcatcagggctagtttatgcttgactttgaatga

SEQ ID NO: 41191 - DNA, 201 bp, Bos taurus
ctcagagactaagggcccgggaggcctctgactggatgaatcgacccatgctcacctagagaatcagcccactacctgtaactgcctcccccgctgtggcrgcaggcgaaccataagaggactggccccagacgagtaaaaaggcatccctgggacaaggtgggacagaggaatgagctgaatgggaaggcttgctcacgt

SEQ ID NO: 41192 - DNA, 201 bp, Bos taurus
actgaaggaagggcagactggctgggggcggggtggatggtacttataacctctggttaagcccaaagacactgtgtaaattatggcccgtgtcttccttygtccctactttgcattcctgatcagatcgtcactttctgctgggagagagatcctctgtatacagggcccagggccttcctgattcctggatcttgttcc

SEQ ID NO: 41193 - DNA, 201 bp, Bos taurus
aaaggtgaacctgtggactgaggctggactgcagacaaggcacctgcgaagatgcagggagagcattccaggcagcttcagggaaagctctggagaagggrgtaggcctcatctaccgtcacggtccttggggcaggggcatgccacaagctctcacgtgcatctcctgtgattgaaagctaaggtaacccacacctctgg

SEQ ID NO: 41194 - DNA, 201 bp, Bos taurus
ataagatggtaaatatcaacagatataatccacatgaagaaaagttctttgggggtctctcaatgtctcctgaatacacaagaatcctgagaccaaaaagytggagaaccactgcattaaaacatgtaggaacaatcaagttctggaaccaaaaggaggggaaataacttccagaaattatcagggccaccaggggtatct

SEQ ID NO: 41195 - DNA, 201 bp, Bos taurus
aaattctaccaagagttttacccatttcagaaaatcacagtggaacagccacatctctcccggaattcaagtccccaaaacagcagccttgcggcccctgygtttgcagccaggtgcatgtgatgctctaatgtgccatcagcctctttccccttgtgccaccttgggcctgctggtggaatcggtgggcatgtaccagct

SEQ ID NO: 41196 - DNA, 201 bp, Bos taurus
tggctttgaaggcagatgaaggggcccacaagccatggaaaacaggcagccacgagagcgggaaaaggcaaggaagaaggtctccccaagactccagaagragcacaggcctgttgattttacgccagtgaaactgatcttagacttgacattcagaactgcaagataataaatatgtgcttttaagctaccaagtttgtg

SEQ ID NO: 41197 - DNA, 201 bp, Bos taurus
cgtcaaggatgccctcagcctgtcagccccctctgttacgggtgttggtgagagagcagaggggcagcagtgctcaccgtgcggcctcgttctcactcacrtatgcagattttcaaagaatggggaggtcactgtcccctttcaccttacagggagtagaggccagctcctctcatcctgaactctgaacctcagcaggga

SEQ ID NO: 41198 - DNA, 201 bp, Bos taurus
ggatgcttcaataaagttcacccaatgctagatatcttttatctgaaaatgaagtaataacccacatatgtgtccaagcagccaagtgtccccagcccttrgatccaggagcagcaggaggaaggccacaggaggggcttccagggaacctggcctgggcggccccctgggcactggacaggccagcccacactcctggct

SEQ ID NO: 41199 - DNA, 201 bp, Bos taurus
cttacttttgtttgtttacttcagttaagtgtttattgaaagtctactatcgatgtacaaaacatcacagataataatctctactctactgattacctgtmtttgtgaaaattcaagccgtgtctataatttatggacaggaattgattacaagagtgaagtcagaagattttaggttaaaaattacaaaagctatagata

SEQ ID NO: 41200 - DNA, 201 bp, Bos taurus
cattaaatcctcagaacaatcaaatgagacaaatactatgacccataaacctgatatatcagtcaaggtacaattagaagaaaccacatggtaatttgaayaggaaaagtttaatataaagcattattaattacaataggcaaagaagtactaaggggtagagacttaagatatagggagcagtcactacttacagggcta

SEQ ID NO: 41201 - DNA, 201 bp, Bos taurus
gagcgatgaccactgtctagctgcagtgcgcaggcttgtcatggcactggcctcttttgttgcagagcacaggctctagagcgttcaggcttcagcagttycagctacacaggctctgtagttgtggtacccagccttagctaccctgtggcatgagggatccttctggaccaggaatcaaactcatgtgtcctgcactgg

SEQ ID NO: 41202 - DNA, 201 bp, Bos taurus
ggcccatgcgtgtctcccgcggcttcccatctcacccctggcccctcaggctaattcaccaaaacgaccaactcaaagggcaagaggagggcgcccactgygtgttctctaggcctttcagaaaacatggagttgttcctttggccacatacatgcgaatctacaagaagggtgatattatagatatcaagggaatgggta

SEQ ID NO: 41203 - DNA, 201 bp, Bos taurus
taagacttcttcctagatgtgattctggcagtcacagtagatgaaggcttagttggtcgggaggggagcgtatcgtcaatagctttctatcccagggcccrtgcctgaagagggtgatagggaggaaagcaaaagcccaagaaattgctggatggagcagagttcacacgtgaaacacgcttttaaaagagtcaaggccaa

SEQ ID NO: 41204 - DNA, 201 bp, Bos taurus
gcgtgtgtgtgtgtgtgttggagtgatgactggggaatcctgagttggataggattaacaacagaaagtagatcttttgtcgttcgttggccttagagatrgggtaaaagggaattcccactttgacctgggagtacttatccagttcagcctgaggcagggcagagaatagaaatgaatatgagtagggggccgattgtg

SEQ ID NO: 41205 - DNA, 201 bp, Bos taurus
tcacataggccatcttaaatgtagtaagaaagacagcatttttcatccctaagcccacaatctcatgagcccaaaggcaagactttccacatctgtttaayggttttgagaatattctgattggccctgcctgggttacatacccaccattgaaccaattagcgtctcagaggtggggattttggccagccttggaggtac

SEQ ID NO: 41206 - DNA, 201 bp, Bos taurus
ttcttttttattcataaattcttcacacatttatcaaaatgaatttgggcaggatttttttttttccccagaaggaaaggataatgcatttttcaataaakgataagattcttacctgagaacttgaacttagggtcaaagattgagatggtgaagtgatagttaaaaagagaagataaagacagagggagggtttaacat

SEQ ID NO: 41207 - DNA, 201 bp, Bos taurus
tagggagagccaagctccttctactgggcagctggggagactggggcctctagcaggagggaggtggcttgggcagaggacatacagagatacaggggatytgtcccttttctgcagcctaaggcctgagggcttttgctccagatgcactgaacacgcaacaggaggaggcagaaggtaaatggatagacttcaggaagg

SEQ ID NO: 41208 - DNA, 201 bp, Bos taurus
tctgacaagaagtgatgggaccagatgccatgattccagttttctgctatgttgagttttaagcccaaatcctccccatgtctgtagcgtggcctgaacayccatgttcctggggcttgtgggttctactgcatcactgtgttgaaaccaacctccccccattccctcctgccccaacaaggctttggcccctcagcttgc

SEQ ID NO: 41209 - DNA, 201 bp, Bos taurus
aggcctggggtacatgttctggagactgccagtacggttgcagtggcctttctagctgccatgtacgactggattcctccatggatgcacttgagggccargtgacttccaaggtctttgaatggctctgacagccatgacctagatggtcatgtagctgagtggaggtagggcctactcaggatagcaagggctccccag

SEQ ID NO: 41210 - DNA, 201 bp, Bos taurus
gaggacaggaatgtaaattcctattgaaagccgtcaatagttaaaatttggagccccattaatatagttcaagtcagaatgcacttaagtaatgaaaagcycaggcggtggcctggagtttccccttcctccatcaggcctgccaattagcccagagtaatggatgcccagaccccaggacaggactgagactggctggaa

SEQ ID NO: 41211 - DNA, 201 bp, Bos taurus
ctcctcagcatcccttctttccacttcaggaagcctcgtatccatcctccgttcatccgtttaggcattcactctcattctcgttctctccattcccacayaggcctgtcattctcacaccatgtgctgaggctccccctgtgctacagtacactcatagggatgctacagggtgttttgagtgttggaaggcagcacagt

SEQ ID NO: 41212 - DNA, 201 bp, Bos taurus
tgtgtttggcaacccgcattcacctaatgaaataacacttcagaagtgtgcctgcaacctctaagaaaattgagttagcttagcactccattgtgggccakgtgtagatttgtgtgctcgttttcaagctgtcttcaagctcctccaaggaggaggagtggatggaggaataggctttatctgtatttgtaaggagcttcc

SEQ ID NO: 41213 - DNA, 201 bp, Bos taurus
acatctgtatacctgtatctgtacagatgtacatactatattgtaagcggcttagaaagttttaggaaacttcacagatctggggccatctggtttctggyagaccttctattcctttagctgatggctgagaatccttcattcattcattcatcaaatatttactgaactggaacccttcaggccatctcctattcaggt

SEQ ID NO: 41214 - DNA, 201 bp, Bos taurus
tagcatttaaacttccgcattgagacagggtgagaaatctcagtaaacagtcaaatgattctggattgctcagggtctgggcccggggacaggcagggtgyacctgctgtgctcactgatggaagccactgacaggtaaacagcaagttaccgggtgctctggcccctctctgctgctcagagaacagaaaactgtgagga

SEQ ID NO: 41215 - DNA, 201 bp, Bos taurus
cacacatcagcttggagggctgacaggtccccgatcactcaacgggcaggcagcaaactctgagggcggagggagttaactcggccttatcttgagctccrctatcaacaaacttgtcatcacttaaccaagttgttagtcactggaacaatttgatggaaagaaatttgtgtcccagggagaaacaagttgacccagatg

SEQ ID NO: 41216 - DNA, 201 bp, Bos taurus
acccttcaataccttccaaccatgctgcgatggaattaggattattcattatttttcacagagatgataaaacactgggcctaaagttggtgctcagtatytcttagctgatgaagatagacagaatggtcctaagggaccacactgaagcagcaggccccacactgtgcgaccgcgctgtctgcggttccctcaccctct

SEQ ID NO: 41217 - DNA, 201 bp, Bos taurus
atgatggcacccaatcagggcctctgaggatgcatgagaggaaatccaactttatggaacagggactctaaggtgtggccctcattggccaagggtcagcrtgggctggagagccaggggaaggcaggaggctgggggaagaccagggaaagaggaggaggagaaggatgagcaggaggcacctggctgggccctggggaa

SEQ ID NO: 41218 - DNA, 201 bp, Bos taurus
gcagcaacctgaaaacgtagccaggaacgcacccagggtgagtcagacagtactggggacccgcggcctagccaactctcgggtcagccagcgcctggccrggggtctcagtattgtgctgcactgtgaaacaggtatggtggtcaggaagctcttccccacactgagaagtctcctttggggaacttctctcttgggcca

SEQ ID NO: 41219 - DNA, 201 bp, Bos taurus
ttgccagcaaggccaatacaaggtttgcttttccaagctttctggtatttttcccccaatttctggctggttgaatcttcagatgtgaagcccaaggatayagagggccagctgtactttgtcacatatctcatactgctttccgaagatataaattattacagatgctcagccaaagcccccagtatacccttctcttat

SEQ ID NO: 41220 - DNA, 201 bp, Bos taurus
aactgttagaaggtgggagcaagtcaagagaagtgataaagcctgaatctgggcagtggtgggagatagtgggggcaggatggggtggatgtgtgtggccrcagtgggaggagtctctgaatgtaccaggctcacaaggagaggtgcctgctgcctgatacccggggtccaggggagaattaatgggtgcatgtgggcgag

SEQ ID NO: 41221 - DNA, 201 bp, Bos taurus
caaaatgacatgcttctcctgggcttgcagacgtgcggctcacgcctttcttaaacaaagactttcattcattgcctctctcctgactctctggcctgccrctggctacccacccctcccaagtcccaatctcctttacataaaatgtgaagctggagaccaggagctgcgtggagaggagggctcagctggccagggtgg

SEQ ID NO: 41222 - DNA, 201 bp, Bos taurus
tcattttttactttgattgctcacagtgtcccggccttggcccttgcaagttgttttctctgtcctttggatctgtgggcagggtttatgaaaccccagarctccccttgaggcagccaaggccaggctctgggaaggagcaccttgaaggggagtagaagtgaggggggagatggtggtgcttgacaccccttccccaca

SEQ ID NO: 41223 - DNA, 201 bp, Bos taurus
ccaggaggtgctggctggagagaaaggaagcggagcttctgaacaggtggggacccagacaaaacagtcctacagagccaggaagagctgagggttttctytcaggaagtactgtcccctcctgccctttgcagttgtccttctgcaagacatgtggcatgacctttcatgattacacatgtggaatgtgtccacatccca

SEQ ID NO: 41224 - DNA, 201 bp, Bos taurus
gccctgtagtgaggagggtgggggaaggaaagcagggttgggtggcaagggtgggacagctttactcctgccttggcccctgcccctgccccgacagaggrgaaagaggtcactttttagctccactttctaaaggtctgcattttacaaactgtggacaggaagacatcctgtagagcccagaggccactgggctcggga

SEQ ID NO: 41225 - DNA, 201 bp, Bos taurus
ctagggaggttcccctgcatttcccgtccctgtccagcaacctagagaaccctcttctggatactgtcatgccctgagcccagccagtgtccatctactgygcacctggaggccacctggatgcccacctttcagcccccatgttgactgaccagggctcaggccttgtatttgttgttgttgttgttgtttagttgctcc

SEQ ID NO: 41226 - DNA, 201 bp, Bos taurus
cagagattctgcccagctgtcctaggtgacctgggcctggagtcgggggtgaggcctgcatgcctatctgtccatcttctgtccaggagctctatgcagcyggggagaaccgcctgggaacagatgagtccaagttcaatgcgattctgtgctcccggagccgggcccacctggtggcaggtaaggctgtcctggcttccc

SEQ ID NO: 41227 - DNA, 201 bp, Bos taurus
ggcaacccactccagtgttcttgcctggagaatcccagggacggggcatcctggtgggctgtcatctctggggtcgcacagagtcggacatgactgaagcratttagcagcagcatagcctcaaagaaaattccagctggaaagttggtgttaggtgattggttgggatgctatagagttagtagcacatatagagtgttt

SEQ ID NO: 41228 - DNA, 201 bp, Bos taurus
agctttacagtttctctctcagagaggagaaaagcccaacactgggagtgacccatgtcctgcaccctgatctcacttagctcctgagtccctttctgatrgtaaccagaagttctattggacatcggctttcctcctctgcagccagtctgcccctggtggcacccgtctcacacatcccctcttccatgaggcccctgt

SEQ ID NO: 41229 - DNA, 201 bp, Bos taurus
tctgcccggaactgtctgaggcgggccctgggttgtatgcactttccaggtctaaaccgctcaggttcaggtactggggtattccacaaaggagcagacasggttgggcctgcattttgtacccttcccaggtccgagcagctcaggtgaccaggtgtttggcgagcatgatagctctgacttatcgcctcctcatcccgc

SEQ ID NO: 41230 - DNA, 201 bp, Bos taurus
gggtctgtgaatgctctggcagaaggcctctatgccagacctcccctgacagttcccagagaccaaaaccaaagcaacctgcccactgctgtcgggatggrtctcacaggcctttgtgccttgcagatgccctgccttaagacttaagtaagagggagagacagcaacaaagacatcaatagttattggacagggcatctt

SEQ ID NO: 41231 - DNA, 201 bp, Bos taurus
cgccctgcttagaaatccacagttctaagcagcatgccaaggccctgagcatgccaaagccctgagaagttctgcaggaaaatacaggacttccattcacyctgcgtttctgtgccactctggcctaggaccccgcccgagagctctgttacatggcaacatgtccacagcagagatgcctggcagtggtcagtggcctct

SEQ ID NO: 41232 - DNA, 201 bp, Bos taurus
ctaagcctccagggctcatctttaagtggagggtagcaaagttttctttacagaacagacatgagaattacctgagattacttacgtaaagcacttaggaytgggccagacagatcatgcaacatagtaactggtagttgttagtttcactattgtaacaattacattaacacaaactactacgtgtcaagcatagctaga

SEQ ID NO: 41233 - DNA, 201 bp, Bos taurus
gcctctggcccagggagattacagctgggcagggccctttgccttttctggtgctggcgggctgtagaaggacagcctggagtatgcactgtagagtgggyagaggggccagagaaaagccagggttccctccagacccagaacttatgcccaggaggcaggcctgcagtgacacagctggagcagctgttcagtgtttgg

SEQ ID NO: 41234 - DNA, 201 bp, Bos taurus
tggcccacacaggtatgtgtttgtttgtgtatttttccatattttggcttgccaagacagagggcaaggattacttaattatagactccacttgaactggragtggctgatccttgcaggccctcagctcctgatctcattggttcaggcgcatctgaggctgggaccaccaggaggaatttgcaatgatgggcagtatgt

SEQ ID NO: 41235 - DNA, 201 bp, Bos taurus
caacccctgaaggggatatctgtggtcattgtgtccacccttcgtgtcagggtttattgggggcctgcttttggaaatgaagtctgtctgatgtcctgaawaacttcccgggggaagctgggatgtctgtgccgctttggctgggctacactctaacgcctctctggatcttgtcctgccagttctgtcctcctcgttcag

SEQ ID NO: 41236 - DNA, 201 bp, Bos taurus
gacagtaatatatatgtcatagggctgtaagggagattaagttagtcctcagtacacgtacctggtccttagttcatactttttagtgcacataaggcctygatatatggataaatatattattatcaatacaactttgtgactaaaacaaaaatgcctactctagtgtccgcattggagaataggcaggcaaagtaaacc

SEQ ID NO: 41237 - DNA, 201 bp, Bos taurus
agaacaagtgttctgtataattttagaaatgtaatttggaatatctgatattttcttatgtactgtaataatgggtaaacataaaagaatgttcaaaatakgttgatctggtgaatgtgaataattcacttgttactaagttgccttttacctattgaaatatattcttctggaataaaacaactagaccaggaagatttt

SEQ ID NO: 41238 - DNA, 201 bp, Bos taurus
ataattattttgcctgcaatgatctacaccaattctaattttgctttatatttgctgtgcctccatgacatgggatacatagggcctctgagacctggctrtaaagatattgattaaaaattatttaatatggtctccaaaatcattaatctctgccagagccatcctcctaaaagagcacatgctaaaaggcccaggagc

SEQ ID NO: 41239 - DNA, 201 bp, Bos taurus
tatattaaaaagtaacagtgaatcctgtcacacaacattcacaaccaatagatacatatattctagagatagtaaatttcacaattaaacatgatataaartagaaaaaatatggctgagacgattgaaaattcaaagtaggaaaatataaagaattcatcaatacactgagcaataataaatcctctcattccaaatgat

SEQ ID NO: 41240 - DNA, 201 bp, Bos taurus
catgcacaaaagatgctgaccttttctctgaaagacagtccaagactattttggtgcccttactaggattcttattcctgagatgattaagaacacatttrgaatttcaagtggagcagagcacctgaattgaaaagatgtctgacaaatggtttttaggtgaaggaagagagttggacattctttctgtaaaatttttaa

SEQ ID NO: 41241 - DNA, 201 bp, Bos taurus
aggtaatccaggaaaatcttactattgcaacatccttaattatataaggatccttatcatataaggtaatattcacaggttccaacaataagaacctggayatctttggaggccttattcagcttaccataacctccaatattatgacctgaagcaaatttttactttatactaacaaattcctaggaggataactgaagc

SEQ ID NO: 41242 - DNA, 201 bp, Bos taurus
aattagcatatgaagcagaatgaaagtatcattaaattgagaagaatgaaacagtcctctctgatacaaggcacctgggaatcgtaatggaaggaagaccygtataataccaaagggagaatgaccacagttctagcagtcataattctctattttcctagctgtgcatttattatacttcccaaaagaatcagcactatt

SEQ ID NO: 41243 - DNA, 201 bp, Bos taurus
tcagattacagtgagaagcactcattccagacctcatctttcccaagatatggggtctatagagagcccatggctgttcctctgcatccacttggatgctrattgcgttcccttctcagatcaatagcttaataacagatagatttgattagcctccagcccaattcaaaacaccaagctgacattcatctcgtgtgaccc

SEQ ID NO: 41244 - DNA, 201 bp, Bos taurus
aagatacagttgatcaggaccatgaaacttcaaaggaacaaattttcacttaataactcatgttattttgtaagcatgtattattaatatatgccagcttytgagtgctttgtgtagagtatgtcacttgttcttaaaatatttacagatggagaaactgagaaaataaattagcatgccagtgtatagctccaattatgc

SEQ ID NO: 41245 - DNA, 201 bp, Bos taurus
ggcacttgccctcaccaagaactacatcacatctaatattatgtattaaaatgctccatttatgtgtcaacccctctctctcacaaggtgtttagtttaarcatctccaaaattcttttactctaccaaactctccatttcctgccggggtccagccccggtggatccagggaattcgaagtggggacggcgtctgcgagg

SEQ ID NO: 41246 - DNA, 201 bp, Bos taurus
ctctttttacccaaagcgtgatacatttacattttttagttcaacaaagttattatatattacaaaatcattcatttcttgatgaaaattttagaaatatrttgactactcttatggaaggtgatagagaaaactaaattcaacattttattaatttatatccttttgcatttattcttttgtggttttgttcagtggtat

SEQ ID NO: 41247 - DNA, 201 bp, Bos taurus
aagtaatttgcaatcctgggaggtggaaggaggattgtggggcctaaggaagaggtgtacccaggaatcatcccaggaaggtggcttgccttcagaggggraagcctgtgcacctgcagcagaggcccccaggtcccagactctctgatctaaaggaaacaggaggtcagggcagccagaacacacattagtgacccacat

SEQ ID NO: 41248 - DNA, 201 bp, Bos taurus
cgagagtgaccaaaacatgtcagatcatattattcttataaataaaatttcagtgaagcatttcatccagagaaccggtgtttattatgtcttatctctgytctccttctctctccttgctttctctgccccaggcataccatttcactccaactgtgggctccagaagctccccctggtcattttgctctttcctcagat

SEQ ID NO: 41249 - DNA, 201 bp, Bos taurus
gaaccattcaacttcagcttctccagcattagtgcttgtggcatagacttggattactctgatattgaatcattggccttggacacaaactgaaataattstgtcatttttgacattgtactaaagtactgcatttctgattcttttgctgactatgaggcctgctccttttcttctaagtgattattgcctgaagtagta

SEQ ID NO: 41250 - DNA, 201 bp, Bos taurus
tcctttacttgacaattatctttttaacccccttgttgtaccagatattggtttagagatattaatgtgctctcacgtgtattagttggcctcagctacartaacaaaatacaaatccaagagaaagtttccagaaggctttgtttctcataagaccttgcttgtgcacttgtcgatggcaactatgtgccatgttctttc

SEQ ID NO: 41251 - DNA, 201 bp, Bos taurus
actggagtgggttgccattgccttctccaatattggtctgctaggcctgccttaacagagtaccacagactgggcagcttaaacaatagaccttggttgtycacagttctggaggccagaagtttgagaccaaggtgttgaaagggtaatttccttttgagggctgtgaggagaaatctgttcagtgcctctgccctagct

SEQ ID NO: 41252 - DNA, 201 bp, Bos taurus
cagtatgtaatcaactataaataagaaaaatggccgaactaataaataaaccaaacaccaaatctctgagcaaaccaataaaccagaaatgcagaagtcgraagcacaaattcataaaataataaatgatggaggaaaaatcatgatatttggaggaaattaaaagattgacaagaggctatgctgttcaactatgcaaaa

SEQ ID NO: 41253 - DNA, 201 bp, Bos taurus
aaccatcttagtagtcaccaatgggttgatatgaagtggcacagcttttaaatctagttctaaccttaccagatgagatactaatatgctgggaaggccaytgagacactttaggaaatgaagcaggcagccacatcacactgctgccttgctttggtgagttaatccatcatgtgtagctgcttttctaatagtacacca

SEQ ID NO: 41254 - DNA, 201 bp, Bos taurus
acttgattcaggccaactgggacctcatgacccaccctccccccaaagttggactcacgatgtctggtaatcacctttctcttctagagcagcagtcagcygtgccctgaaactccacagggaatgttctccaagacctcctgggcagctagcatctgtgtcatttaaacatcaccaaggtcttcccaagaccacagcttc

SEQ ID NO: 41255 - DNA, 201 bp, Bos taurus
ccaagttggagactcagacaggaggcgatttgtagcaggagcatgtgctaggggatggagagaagtggcagcaaggtccagtttctgaatgtggccagccygccgaggaagaataaaggctgaagaaagttggctggcaccaaggtgagcccagatggctcacggccacatgaagaccctgagaaaatgaaatattatggt

SEQ ID NO: 41256 - DNA, 201 bp, Bos taurus
agaccctgtacctacctgaaaggagcccaaagtttcccccacacctcaagaaacacaacgagattcccccctcagtgtcagatgtggcccttatcccctgmagcgcttccagagcaatcacgagttccttcttgaaacttgaaatgaggcttgaccctcattttacaactcgagtggaaagcacagttccatgcctcaaaa

SEQ ID NO: 41257 - DNA, 201 bp, Bos taurus
gggcgtgtaacagctaattttagtccagcgtcttcacgtcacaaggggtgaaactgagtcaaggcggcagggcttctggtcacttacacatcaacagctgyttctttctggtaagcaagaagggctggaagggggttccctcagttcttctgtgctcagtcgtgctccactctttgcagccccctggactgtagcccaggc

SEQ ID NO: 41258 - DNA, 201 bp, Bos taurus
ggcactggccatggatgaccttggagaagctatgtgaacactatgcctgctgttctgaggcatcggtgtttcatatgaaagtttcctggctcagcagaggkgtggccaaggaccttcatggcagcaagtgctggttagactgcctggatgacagggattcctgtttgtgtgtcatctgccggtcttcttatgctactgttt

SEQ ID NO: 41259 - DNA, 201 bp, Bos taurus
acttccaatccagataatggagccaatgagacaggaatcctgacaaaaggactggagaattataacaatgattttcatatcaaaagccttgacatatcaayatttcttcagctgctgactgaataaataataataataactgggtaaatataataataactgggtaaataaattatggcacagtcataccacttcagagaa

SEQ ID NO: 41260 - DNA, 201 bp, Bos taurus
ttccctttcgacaacatcatcacccaagagccaatgaatgggtgtatcaggctttaccaaagagccagagtaactagagggaaagataatgaaaggagatkcggatcagtgaggggaaggggcctcaagataaccctccacgtgtctgtccttgacatcaatggtgaagcttgagcagaactcagccttcgtaggggaacc

SEQ ID NO: 41261 - DNA, 201 bp, Bos taurus
ctcaaatggtatgactacattatgcaaaacttttgaaaaccagtatcttgctggttctttcaggcaaagaggaaagtctgggggccaggggactctgtatkgtgggggtggacatactccccacatcaggctgggaaatctcagagcttgtggggcagctggaaagtgagcctggagctgcgtggagaggaactactgggc

SEQ ID NO: 41262 - DNA, 201 bp, Bos taurus
ccaaggcgtcttcaggccttggctggaccgccactagagtctcctaactggtcttcttacatcacaatctgaccatctccctcctcctcttctccgcacakctgccagggtatcttgccaagaggcctgtctgatcagatatgaacttaagacgaggaccagacaaaccacagagccctgatggccccgcttggtctgatc

SEQ ID NO: 41263 - DNA, 201 bp, Bos taurus
ttaaatgactgaattgacacatttttgcattccaaagtgacttttgaaccttgtatgagttaagggaagttctccaaatcatgttctccaagagttttcaycctggaaccactttacatgggccacaatctgcatgagcaaaagggaccttctgcgctatgccctcaatgtccaggaagctagtgaccggactctaggacc

SEQ ID NO: 41264 - DNA, 201 bp, Bos taurus
ctctcctgccaatcagcatttcacataaccagagcaccagtcagaaatatgtcagatgagaagagatgagaaggaggcctagtaaatgcagctaccttttmgagtcctgccttctaaaataatttctcttatagcagttcagggaccctcctgagcaatggcctttacaggaagctgaccactctggctaaaccacagttt

SEQ ID NO: 41265 - DNA, 201 bp, Bos taurus
ccttcgaggcttctctgtcagtggggctctccaggcatgaatgcaggagtgtattggacaatacttgttgccatacccttctagaccaaaggagctgcacygcctccacacctggccctcactggggcagacccaagtcctccaggacagcctcaggagcaaaccccagtggacgacccacatgcagaggtggaatatatg

SEQ ID NO: 41266 - DNA, 201 bp, Bos taurus
caaatacaaacagaaattgttaaggaagtggaagtgtggtgagtcctcctctcctataataaagcttgttacatattgctattgttgcttgtcagtcaaartgaaataagtgctgttttgcctgaggaggacagggttggttatctctactgggcttgtttcttacctccagatctcctggaaccagaaactagaatctta

SEQ ID NO: 41267 - DNA, 201 bp, Bos taurus
gtagtggcactgaaggacagcaaagctcatttcaaatttctacgctccccttgtgatctgtgaagacccagcagagccagaaggcatgcagcatggcccgrtgcatgatgacggcacagggcatagaggagtctgggttatgtctctcctcggaagaggcaagagcttcatagggtcaaaagtgggcgaacaccgctgagg

SEQ ID NO: 41268 - DNA, 201 bp, Bos taurus
agccacatctgggcctgcttaccactttcagcagctgtcctttccactagcttgtctccttcatctgccatcaggcctacacctgaacccctatgctaagragtgagtaatatctcatgtaaatgggtcagtgttagtttcaaccttgtaggctaggtctggcctttggaattagtatctccagttattaacaaacacaga

SEQ ID NO: 41269 - DNA, 201 bp, Bos taurus
gatgtaggcctctgtctctcaggaattctgcagaaggcagttggaaggggacttattcacgatcctggaggcactagggtaatgcatttcacaggacacgmctggtcctgttagagctccaggccccgagcgcagactgcgggccaggcaccctgtctgaggctgtgcacactgatctcattgccttctttatgaacagct

SEQ ID NO: 41270 - DNA, 201 bp, Bos taurus
caggtgggcttgcctgaaggacacaggctggaggcatttgctcctcactacgctctcagtgcctgcagtagtgtcgcgaggccaagcaggttttcagtagyttgctgtacggactgaagggagtgaatgtttccatttctaattaaaaaaaaattataaatttttattggctattttccacttacattattgtaaaatatt

SEQ ID NO: 41271 - DNA, 201 bp, Bos taurus
gaagcagaagagaatagctgccaagtccatgccaagtccttcaatcatgcagtcaagaaatacattattttaatttcaacattcatggagccctgtgatayttctccccagatagtattttattttgatttatatatgatctctaggataataattctactttttccttcagttttctgtccactaccttacagttgcttt

SEQ ID NO: 41272 - DNA, 201 bp, Bos taurus
caaaccaaaagagaaaaaatgatggggatcacttcgaggggaccacaagtatttggaagggtgaggggagatcttaaccacagcagaaaaaaatgtgaaayagaagatgtggaagaggacttccctgatggtgtggtggttaagaatccacctgcccatgcaagggacatgggttcaatccttggtccaggaagattccac

SEQ ID NO: 41273 - DNA, 201 bp, Bos taurus
cagagccaccaaaaattcccaggtgggtgtgaccagtattccatttattagaagaaacaacatggggtatagcaaccagctacaaggtgaatgggcattamaaaggaaaagaaggtcaaaggtaactctataggggcactgcaggcccaaagaggcatgcctgcatttcagaagtggctttgaccagaatgagtctcaagt

SEQ ID NO: 41274 - DNA, 201 bp, Bos taurus
cctgggtaagcaacagccatggacaactgtatgacggtcaccgggagtctaatcacccaactcccaggagtcagatcaactcagatcagcacagaaattcyggttagttccagcaaggttgcaacaacccacatttacaggtactggttaacctttctgtttccgcttgtgttgccctattatcctggaagggaaaactaa

SEQ ID NO: 41275 - DNA, 201 bp, Bos taurus
tagctgcccatagtgaatgatcgggtattagtctgaaactcgctatttctactgtgtagggtccttggaagtaaattgaacacacgagtgcctctgtgagyattgcccccaagtgtgtctagtccatttagtggactgtcctgtgggttcactttcattccatgctagaatggcagcttgatctactcatgcccaaggaaa

SEQ ID NO: 41276 - DNA, 201 bp, Bos taurus
tcaaggttatcctactttttaaaaacactgtaacaaggtgatgtatttcaactggtcaatttgtgttcttttctttggccaaagcacaaatacagtcagcytgttatcaggggcagtttgactaaacagctattaccgtcaccaaatcttaggcctagcttgactaagaatgtcgtttaaataactgagttaagtgtaata

SEQ ID NO: 41277 - DNA, 201 bp, Bos taurus
aaacaaaaccattgaggactatgctgctccctaactaaccccttgtaactttttagtgtcctaaactgaatggattcagtgtggtttcctccatgcccatrtggtctccagatcttgcatataagcaggtctgtgttcccgaccttatatatcagcagaacaacctcacagatgctgaacagaggtgctgtcatctcactg

SEQ ID NO: 41278 - DNA, 201 bp, Bos taurus
caatattttgtcatacattaatttacatatttgtttaaggccatgttaaataaattacattaaagtcaaacagattatcggcttgttcttcagtctatacraaagtttcttaacttggccattattaacattttggacagaatagttcttgcctgtgaaggcttgtcctgggcacagtaggatgtttagcagaaccctggc

SEQ ID NO: 41279 - DNA, 201 bp, Bos taurus
ggggcatcagttcaatgctgcttccaaggaacaggtacaatgtgaggtaagggtttacagtgatctatccatttctggccttggcaggtgacagttttagratcatatgaacggtaaggcagagggttagggttagtacaaagtacttcttgtatttcttggcattagaatagcagtgtaatggccttgatcttgaaaatg

SEQ ID NO: 41280 - DNA, 201 bp, Bos taurus
gttcttaattatcacataggtcacagatagacttatacatccgtatgtttaataaatttactggcttgaaattgtgttggagtgatattatttggcctggmtataggacctgagtcttaaattacagtcacttatataccattctggaatatgttgctgttgctcagtggctaagttgtgtccgactctttgtgacaccat

SEQ ID NO: 41281 - DNA, 201 bp, Bos taurus
gaagccaggggcagtgaccctacaagcaactgacccagacttgccggtgagtgtccaggaatctctggaggaggcatggtttggcaatggcctgcagcctkattggggagtctgagtgcagcagtgtgtgcatgggaccttttgaaggaagtcctcattatcttcattaccaccactatagtttggtgtcaggtcaaacaa

SEQ ID NO: 41282 - DNA, 201 bp, Bos taurus
gagccacttgagaattctgaaagtcacatagaaatttacttggctctcattatccaagaaaagcatattcccgttcctcagaaaaaaacaaatgggtataycaagaataagagtggaaggggaagggaaaagcaaattgtatctccctctgtttagattgtggaatcaagttatttacttgcctagcatgaatgtagactc

SEQ ID NO: 41283 - DNA, 201 bp, Bos taurus
caggttttattttccatctttattaatcatctccaggggggaataaattgcctgctaatgaaatttgcagatagcactaaattttgaggtgttgccaacayggttaacaaaggagaaataaatataaatggacttaagcatgctatttatcatttatttggacttaatcataattgttcccaggatacatttataagcaat

SEQ ID NO: 41284 - DNA, 201 bp, Bos taurus
agccagatattagataatgctacagaattatgtcatgtattagagaatggcacagatattgaaatgcagtagagattgttttattaaacattggagaggcmatttatgagtagaaataagaaatatgagaatatgtgtatcaattaagacaatatttattcagtaatattgacagagcatctgctattaatatatgtaaag

SEQ ID NO: 41285 - DNA, 201 bp, Bos taurus
catcttattaaaatgtgcatctaataacgcaagacgtgattgaatgtcattcatttcgatcccattgatcacatagtgtctgttggtcccagtgcaatttrtcaaggtaagacaatagtttaaagatggaagcaaacgagcttagttactttcacaattcccaaggacaaaaactgctttttaaaattttctacacgtatt

SEQ ID NO: 41286 - DNA, 201 bp, Bos taurus
agccaggcacaaacctttatcagcccatttaacacagcatcctcagtgccccactggtgggccacacacacgttgcagtctctgtaggttgtgcaatgtayagacattcacataagctacctgtgagtgcgccccctgcaattgaagagtgtcattttcctttctttactcaccatgctgctgctaagtcacatcagtcgt

SEQ ID NO: 41287 - DNA, 201 bp, Bos taurus
caaaaatataaaccagatgttggagttaccagacaaggatgtttaaacaagtataaaatgattcaacaagcaatgttaaagtcacttgaaatgacaacaaycaacataaaatctcagcaaataaacagatgtttgaaaagagaaccaaagaaattatatagttgaaaactcaaacaatagaaaggaaaaatgaaaaatctt

SEQ ID NO: 41288 - DNA, 201 bp, Bos taurus
acagatgcaaccccagtgtcagagacaattcactcaataaatgcatttaaagagtaaatgaatgcatgacaatgcgcacaacttccacttcattattccaygccactggactggtaatccaaacctgagcactatctctgagaaagtccattcaggccaatatctgcttggtatctttccatctctcattcatagtctgga

SEQ ID NO: 41289 - DNA, 201 bp, Bos taurus
aagcactgtgctaagtactttgtatggatttcacatgtacaactttgtgctgaatacctatgtgcttgataaagggccaagctcctccatctccctaattycctcacctaaggggctgtatatctcattgctggggtctttctgtgaacaggctaagtattgagtcacataattagaaatggccactagaaaccacattgg

SEQ ID NO: 41290 - DNA, 201 bp, Bos taurus
caggcaggttctttaccactagcgccactgggaagcctaaaaccccgtgctttgggatgaagctctaagacaagccaacaggcctcttttacagaaagacrggctgtgtttcagtctgccatctgtgcagtgactgcaggcggtagcctcccgcgcactgactctgagatcatcgtaaccctgtgggaccaaggaaagcag

SEQ ID NO: 41291 - DNA, 201 bp, Bos taurus
ccctttcctcagcctaggcttctgggaggggggagccccaggcgccaaaagttccagatcaccagggtaagctgatggagggttggttgatggaaattcaraagaaagcaaggccttcagcatccaccaaccctcagatcactgccattccctgtcatttcctcccgatcactccttggttgccgtgtcaggctgggatca

SEQ ID NO: 41292 - DNA, 201 bp, Bos taurus
aaaagaagataggattacaccactgaacagcattttctaacctgtgctcaaatggtctcttctaattactttgttactcagtgtagcccatttgtttctcytactaaatgtgaaatgttgagcttagtctattactttagctacattttagaaaatcttatcaatgatggaataatacttgtttatatgaagtctttattc

SEQ ID NO: 41293 - DNA, 201 bp, Bos taurus
gttcagtgcagttgctcagtcatgtccaactcttcgtgaccccaatagatatgttaatatgtgtaaaaagtgtgcaaacacttgtgttcagcaaaggttarcatggcaggcctgaggctgctgtttttcttatgaagtccttctggcaggattggccatctggaaacctaaatttcaggagcattcccaccaccctaactg

SEQ ID NO: 41294 - DNA, 201 bp, Bos taurus
gttcatcccttgaatctgatatttggtgctatttcagcaggcctaagctttggatatctatatgattatggtgagtagcttcctatagtcacactacttckgccttctttggttaaatctcccctgtcatattagatattccattcttacccttccccacaagaccttgaaacactcttccctttactttgcaaaaaagtg

SEQ ID NO: 41295 - DNA, 201 bp, Bos taurus
gtcacttctttctgctcatgccttcagactcataccactcatggcagcgatccacatggaattataatacatggtggatattgccgtgttgccagaaggcrgacccatttcagggcccaagagtgagcacttgtctaacactcagaaaagaaattttctgaggagacacatgtactgacaaagcaaaggactttattggga

SEQ ID NO: 41296 - DNA, 201 bp, Bos taurus
tgacagaggccagtcggaaggcagtggcttcctgccaccgttttgattccctacgtgtttcattgttctgagtcccgtgagactgagctagagctcatctrctggccttttgaggcagccaagaaatcattgtcgtgggttctatgcagccccccaccctacccccgtggggagctcagcttaggctttctgcagaatctt

SEQ ID NO: 41297 - DNA, 201 bp, Bos taurus
gtgtttcacatgtaggcctctaatctgttgaattcatttctgtttaaggaaatggtttaggttgaggtccatttttctgcttatgagtgtctgtttactcyagcatcatttgtcaaaaggccatccttcctctactgaattgcttttgcatttctgtcaaaaatttattggacatatttgtgtggttctatttctgaatat

SEQ ID NO: 41298 - DNA, 201 bp, Bos taurus
agcccagttttgcctttgacccactcactagctcatccattaaacaagctcaggttttttctcttctgttattgggccaggagagactctccatgcagccrtaggtattagcttcaggagaattactgatttattattatggtgggtgacatggagtctggactagctacacatctggcacacaagtgcttgctggccttg

SEQ ID NO: 41299 - DNA, 201 bp, Bos taurus
ttattgtgatcatttcacagtgtatacaaatatcgaatcattatgttgtacacctaatataatgtcaattatatctcaatttaaaaaggataaagccccartgagcactaacaggtaaggtataggcgtaagcagagaggcttactcagaggatgaagaaggcagggggcagtgaggagcgggtcatgaagagtatattag

SEQ ID NO: 41300 - DNA, 201 bp, Bos taurus
atctggcttctgtctttacctctccaccaaaactccccaatcgtgttgccagattctaaaaacaattttaaatcctgtgtcctctgctagatctgacatcrccagctgtcttgtttcttgtaaagctcttgcctttcttggctttgtggtagcactgcactcgccctcactactctccataggcattctcttccctctaca

SEQ ID NO: 41301 - DNA, 201 bp, Bos taurus
aagaaggagagtttgaggcaaactaggtttctagttttctagtcttccaagcttggaagactagaaaaatggaagaatggagctgagaaaatacaaggccrgttcagataatggaaagtaaacttgtttcaaccagggtggaaatgtcatatggaacaacagataaggctgggccgtgaaagtgggaaaagatgtcttaag

SEQ ID NO: 41302 - DNA, 201 bp, Bos taurus
cgtacctgctgataaggccctctttcttatccactctcactccgtcccccagtcacttcgcagactcacaggcatgcatcatatttactctgcaaacatcrggggtggttctgtggccatcaagtccaaccagtcccagggaggggctaagggaagctcaagccaccacagaaaaccaggaacgtcagcctgcatctcact

SEQ ID NO: 41303 - DNA, 201 bp, Bos taurus
taaaggtggcaaagtagcacaaggcaaattatttttctgcaccaaatttgagctttgttttgaatgatcggactatcataaaacagaattaaaggagaaaytggtcgactaataaaacactttatgatgcaatgaagatatcagatagcgtaaaaacttggagaaaatgaagtcaaatgaccagagtggaaggagaggttt

SEQ ID NO: 41304 - DNA, 201 bp, Bos taurus
aaacgtttctcaaaatgacaagtgcatattctgtgtgactcagaaattacctctaagaattcatcttacagatttaactgcacatatgtgaaatgagagargcacagtgtggccttgttcggaaacagctccccacccatcaccattaataaagaactgctaaacctaagttggtgacatacatgtgtagctatttaaaag

SEQ ID NO: 41305 - DNA, 201 bp, Bos taurus
atttgtctatttagaatgagggccttggcctgctcttgccagagcattcccaagattgagaatcctatcttttgggcccatatcaatggctgatggagccycctgaccttctactccatttacctggtgccttcttgatactttttgcctgaatctctgaaggtacttcctttggattcatgctatggccagatccaatta

SEQ ID NO: 41306 - DNA, 201 bp, Bos taurus
taaaagagatcccagaggccttatttgtcctttctgccatgtgaggtcacagtaaaaagatggccaccaatgaacccagaagtgggggcccaccagatcayggaacttcctagcttctagagctatgagaaataagtttctttgtttataagtcatccagtgtatgatattctgttgtagcagctcaaaaggactgtgata

SEQ ID NO: 41307 - DNA, 201 bp, Bos taurus
accaaactgcaacccagagccccatttcctcatagcatataaggggttagaattccagtgtatgaatttggcggcagggccacaagcatgcagtccataayggatggagacatcattttctggtattttaataaagacctgggtctctgatccagaatgaaacataagacagagggagaagaatagtccttcccctctcgg

SEQ ID NO: 41308 - DNA, 201 bp, Bos taurus
tataccatcttgaatggcctaatggtgtttttccccaggaaatatacttgcagataattgtataacattttaatgggaaacattttgacctggattaaatrtacaaggcaggccttgttataactcccacttcacttatgcaaaaattgagtttcccagaaactagagagttgcttttatatctcagggataaatggcagt

SEQ ID NO: 41309 - DNA, 201 bp, Bos taurus
gctgttctcgttcagtttatggccagagctacctgagcacctcctcctttagcagtctctcttctgcctccttcttcctttcttatcgtcacagtgatcgmcttttaattgggccaccagagacaacctgaaatctagggagggcagttcgtggtcctcttcttacctcagtgtctaccgctggctctgggctgttctctg

SEQ ID NO: 41310 - DNA, 201 bp, Bos taurus
gatcttcccggcccagggatcaaacccgggtctcctgcattggcaggtgggttctttactgctgaaccagcggggaagccaggatgccttctgcttaaacrtctgggcagcagccctgggcctccctgcttcccttctcctcctgttctctgtttgcccagctagtccttcaagcaggcaaataacccatttggtttactt

SEQ ID NO: 41311 - DNA, 201 bp, Bos taurus
tggacaccgcagcaacagatcccgcatgacacagccaagacggccggatcaataaacagtaaaccgcagggagagtccaagggttcccagggcttggggaytgctgattcaaaggccacgctccccgcgggcacacctctctgccttgccgcggggctgcctcacccccactgcgagaagggcttgccatagcaagtggat

SEQ ID NO: 41312 - DNA, 201 bp, Bos taurus
ccagctccgatcagtacacaagacactgcactttacacgtactgttcagaatctggaggtttcaagctggaaggtgtgttggggccatgcagtctggcctyttatgttagagataaagctgaagcccagttagataacatggtttgttcaaatttgcatggtgagctcacagcacacctagatttaacttggccttggggt

SEQ ID NO: 41313 - DNA, 201 bp, Bos taurus
aaagttttgtttattagctggtgtgtaatttggcctcttcctgcaggtgtctgaaagcccctgggaagcacgcttacccagaagggagaaataaagagctrggtttgcagggcagaggcacagccttgtcttctttttgctgatgcaattttcccccgtgggatttctgctgggtcagccaaccctctgaggtccagggtc

SEQ ID NO: 41314 - DNA, 201 bp, Bos taurus
atctcagagtttgtaaattagaggccatgagaatctgaaccagattatgggcagtggtacggagatcagccaatgggtactttggactgagaaagcagagrtcttggtaattgatataaaggccagttgggaaacggggagccaggagtttttcattggttttgttcattcgtttgttttgtgttttggtcttgccttgca

SEQ ID NO: 41315 - DNA, 201 bp, Bos taurus
gggtgagacctccagagcagatgctgcttctcggccgggtttcctgcaggcacgccccctgtggtcgggctcggcaggggagcccagcacctccgctgggrgacaagaccgcctctctcctccttttcgtcggaaaccccctgggcatcacccactgtggtcttcgttcttctccacagccgtttcctggtattagattcc

SEQ ID NO: 41316 - DNA, 201 bp, Bos taurus
gcaaacatggcacagagacaaggaacagaggctgctgcggctggcgggagtccctgatcacacccggaagttcatccacccagacatctggtgccctggaragggccagggtggaacccgagaagccctcctcggcctccttccatcactcactgattttggcttacaatttgagcagcaaaagtcatttgcagagggttt

SEQ ID NO: 41317 - DNA, 201 bp, Bos taurus
gggcctggggcttccaagaaagagcaatgcccagggggcttcctgtgactctgcagcacctgggctgacctgaaggaaccgcctctcccactgtcactcamacctcctgtgctgggccaaggcagttctgtgccttgagctcctctctattcccccactgctgtctccatggggcagctggtcgtcacagggaatcgacgc

SEQ ID NO: 41318 - DNA, 201 bp, Bos taurus
gacaacttgcatgcctacaggcttgactctgtgaggccgagggaaagctgcttgttccatcacaggttctaggtacggagaactctgccaagggtcttggyggtggggcccgggggccagacggtcatctcagtccactctattgcaggcacagcctctgtggccgtggcagggatcctggctgctctgcggatcaccaag

SEQ ID NO: 41319 - DNA, 201 bp, Bos taurus
catcataggtaggaggagggggcggcccactgctcagcccagctaattctcttgacttgcaggcggagactgaggctcaacaagggggcttcagcaacccrtggagatgcagctctttcccctcacatccaattcagtgcttttattgagttattgacttattgctgcatgtgaaccatagaacggaggcaccacgctggg

SEQ ID NO: 41320 - DNA, 201 bp, Bos taurus
gtggaaggccattagaagctctatatggagaatgatctgttctggtgaacagttttaaaagatcactttggcttctatgtagagactagattgtaggaagkcaggcctcgagcctaactaggaaagcatcacaaaagttggaccttctagaaatgcggcttgggctagggttggataccattgaaggtgaagagatgctgg

SEQ ID NO: 41321 - DNA, 201 bp, Bos taurus
tccaagctctggggacctttaggaggcccactgagagggtcagccggagcacggagcagggtaaggggacctcgggagggcgggcccgcagagagtaaggragaagcgtgttgctaggacgcgacaaaggctcgctccgttgctagggagtcagaatagggccgtggcccagccccctaggtgtgtctggtcccaggtggc

SEQ ID NO: 41322 - DNA, 201 bp, Bos taurus
gtacagtatggttcccagcttctccccgatttcctactgctaaaagaaacacaattgcttttctttggggcaaatgcgggaccacagggacatggataacygtcctattcattttatttaaatggaccaaagacgccaacagaaagagactggtaacaagactgaatagttcgtaaaagaaatgagaacctgtcaacagag

SEQ ID NO: 41323 - DNA, 201 bp, Bos taurus
aaaaataacaaacttttatcattcatttactgtggacatttaatatgtctttaaagaaaaaactaccaaagtctggacttaactcattcacagtaatgackaagaaggaatccatatcatataggaacttaaaatatttatattacttgtagatttaactaggtatgagttcaaactttcaagggtactagtttttccctc

SEQ ID NO: 41324 - DNA, 201 bp, Bos taurus
atacccacataaaccctcctcccacagaacaagcctccaggaccagctgggtttagaactgccatccacccacactgctcttcgaggccagatttctcccrtttgtcctaccctatgacctctgtgtctctgggtctctggtgttctttgaaggcactctgctcagcctcagggacagacaggtggcctccagtaaggtct

SEQ ID NO: 41325 - DNA, 201 bp, Bos taurus
gtttataaacataaatcctctacaatattgtttttgttttaatcttctgaaagagttcctttcctgggaaggtaaactcaaccacagctttgagagagtcygcgtttaacatgagatgacattggttcatctaccaccttattgtacaggcagattcaggagaatattgcctatgtagttccatggtcatttctcagactt

SEQ ID NO: 41326 - DNA, 201 bp, Bos taurus
gagaaaagaagaaataaaagagggccaggtaaagaccaggcatgacagcgtgtcatgaaccagtgatggtaaacaatctaatttgggtacttgaatcacaygcatacacacaaacctaaaataccatagcattatttgctatgaaatgagtaagtacaagttgttacgggagtacaggaagcaaaatttcatccaaagtgg

SEQ ID NO: 41327 - DNA, 201 bp, Bos taurus
tatggacatggggagaggctaggagagggtgagatgtatggagagagtaacatggaaacttacattactatatgcatggccctcttttattctttcctttytcttttcttttatctttagtctcagttcagttcagtcgcttagttgtgtccaactctttgcaaccccatgaaccgcagcacgccaggcctccctgtccat

SEQ ID NO: 41328 - DNA, 201 bp, Bos taurus
ataacgtataattcacagggttgccaaagaatttcatgggataagactagaaaggaggcacaagagcccagagtttcagagcagaggctttgtggtcaggygcgaataggtttgaatcttattctccaactagatatgaccttcaataaatcactaaaatctgcaaaatggagatcataatttttatttcagagggtaagg

SEQ ID NO: 41329 - DNA, 201 bp, Bos taurus
ttggcaggcagaatctttatcacctgagaagccccatataggcctatatatattttttttaattgtctgttttgtcagttaacatttaagttctttgtgarttttaagtttcaaaggccgagattaccatgatttcaaaaacaactgtttttggttattaagattcgtttttatattatagaatgtaattttcatattgag

SEQ ID NO: 41330 - DNA, 201 bp, Bos taurus
ccttaagaaaaaaagaaatatatatatatatgtatatataaatgtcagtgggatgtgggaggtacaggtggccgtggcctggtccagtttggaccagattyttggtccagtttggtttcggataaagattgttaacagtttgtactctacggtttcccagtggccggtttaggctcagatgaatggtgctgggacaataaa

SEQ ID NO: 41331 - DNA, 201 bp, Bos taurus
taggccacaataacatttctgaaagtggtgcacttgcttcttgcatggatttactgattaatagcttttgaccacttattatattccaagtaacgtgctgratgctggcaatgatcatagtttagatggaatgtgatttgctctttgaatctctcataacagagaaaatacgacatatggttgagaaagaccctgcttctt

SEQ ID NO: 41332 - DNA, 201 bp, Bos taurus
actttgaggacatattagtatttttataacagtatttgatggccaaataatcctctttggttagaacctactgccagtgaggccagggtcaaggccatacyttctgtctttgatcttacacctgtttcatgttccaaagtcactcaagggcagcttgtcatgaggggcttggggacaaaggcaggtggttgagaacagctg

SEQ ID NO: 41333 - DNA, 201 bp, Bos taurus
tgtcattctctgattagaaagtaacgcagttcattgtagaaaatatgggaaatatagatatatataaaataaattaggattgctcacaatcttatcaataraaggatctatttattatgtttcttcatagtcagtgcatgtttttacatagttgaacttttcatccttcctttttcatttagtattacagtataggcattt

SEQ ID NO: 41334 - DNA, 201 bp, Bos taurus
ttcatagaaggatattagtggatgttttactgtggcttatgtagcatataacacgaactagcagacagaaatcttcaaatgtgaactgcatttttatgtcmtttgaaaggagattctctctgatatttttaatttagttatttggttgcaagaggacattgtcagtatttcaagaagtctttgtcaagtctgtcgagggtt

SEQ ID NO: 41335 - DNA, 201 bp, Bos taurus
gtcacaaagagtcagacacaaatgaagcatctgagcgtgcatgcacatcccttaggaagtgaagaagcaatgggggctctaaagaaggtggatgttgtatytgttttttaagaaaatctctctgagggtcatttgaaggagaaagtgcagaggtgagtgactgtcaagaggagcctagttaggaaaccctggcaggttcaa

SEQ ID NO: 41336 - DNA, 201 bp, Bos taurus
tgccctgatattagcatatttttgatatgcaaatttatcataattggagaagccattttcataggtactaagtaagagcgatgtaaatcttgactgggccrccctatggacgtgattctccgcttgtttctgcagggagccccgcaaggtggtcctgcataaaggctccactggcctgggcttcaacatcgtgggcggaga

SEQ ID NO: 41337 - DNA, 201 bp, Bos taurus
gtcagaggagcatgacatcttcaaagcatggcacagggctccaggtgaccatggggttaaagacaagagggatgagaaaggggaaatgaggaggaagaaartggtcactttagtgaggaacactgtcacataaagtggtctcagcttaaacatgaaggcaactagaagccaatgaacagctttaggcaggggaaaaaaaaa

SEQ ID NO: 41338 - DNA, 201 bp, Bos taurus
tgttgagaaaacgtggtgggtaggaaggtcttcaagtttccacatcatcaaggtaatgctgttaatactagcgtgtccttccattcctctcccctacctaytgcctccaggacaagttttcggcctggtgacccacaggtctgaatccgggattcaaattgttcacggctttttctgtctctcatgaagaattaggtaacg

SEQ ID NO: 41339 - DNA, 201 bp, Bos taurus
ccagaatgtgcaaacccaaggaaatactgacagccctgaagtgaatgaaagagtgttctgggctttccatcatcaagagcatcatttacaattatgattgkgtaatacatttttatcttgtttgcttcggttgcttcaacagctgtataaaaagtagaaatgtgagccatagagaaccagctaaactcattacaatttgat

SEQ ID NO: 41340 - DNA, 201 bp, Bos taurus
tgtggtgcaatgactagctgcccaggctccatattgcttccaaggaagggtcagagaattggggaaggaaaggcaagacaggttgcctaaaacctaaaatkccttaggtaccttctgaaagatttgtgtttatccaaaaaccatgatgagttttccaatcagagggagccgcaagagcaagaaggtatgaaaaaaggccag

SEQ ID NO: 41341 - DNA, 201 bp, Bos taurus
ccatgctcatgcaaaatagaatttgcaaatgttaaaaagcacaaagcagaatgagatcagagtatgcgagaaggacacttaactctcagagaaggagcttrgggattgatgaggaagatgccccagagtgaccttcaatgagatacataaacatcagccacatgtaaatttaccttatttccccaaagcgtcttaaagaac

SEQ ID NO: 41342 - DNA, 201 bp, Bos taurus
atactctgcaggcattttgtgtggaaaccaaaatgacctattaacttgtctatctactcatgtgctaggaggatatggccagatccccaaacagctagcaygtgggtgttgtctgtgcttagcaaatatttgcgaatcaactaagtgaagcagtgagcacacagaggccctgttctgaatttttcccatcaggggctggca

SEQ ID NO: 41343 - DNA, 201 bp, Bos taurus
ttccacaaggggagaggtttgaggtatgtgggatacagaggtcacgttgcagctcgccagcgtgtgacttagggtgaatcacttaaacccttggtgtcctyaccagtgtaatgaatgataagaaccagttcttgtggagaggtccggattagatcatgtctgtgaaagcatttggtcaacagtaaagggccataacagaaa

SEQ ID NO: 41344 - DNA, 201 bp, Bos taurus
ctttcctctggcctatcctccccacccctactcccagctcagttcctagtttctcctgggcgcccctctttcaccactgacttgcacataattctcatctygggaggagggaacttcatctgggccaacttagggaatgtgattcactcacaaggaagctcattttcctcatctggaaaaggaaggttgtatcaactacca

SEQ ID NO: 41345 - DNA, 201 bp, Bos taurus
cgtgaatggtttgaaagcattttgtagacatgaaaatcactatacttatgtaaggaattagtattgattaaaaggggccaagcgggaggattgataaaaargctcttaaaattctatagttcagatcagttcagtcgctcatcatgcctgactctttgcgaccccatgaatcacagcatgctaggcctccctgtccatcac

SEQ ID NO: 41346 - DNA, 201 bp, Bos taurus
tataaaaagagtgataggccttttctaaggccctgcatcaaaattatttggaaaagaacaaattttaaagaaattaaatcaatctatgtttgtcttaattrtaatttgttttcataaggcccaactgacaggtgatacacttgtttgaattacatccatggataataatattttaatgtttgttagttgcataaattattt

SEQ ID NO: 41347 - DNA, 201 bp, Bos taurus
gttagaataatatgcagtaaataagcattgaatgcagtttgacaaaagtatttaaaagttatggcatggattttgttacttttacaaattaatatctcaaytattaattccatactggatgggtgtaattgttgggttcttgacttgaagttcaggaattgaagcaggaaaattctgtcatcagtaaaaaccttgtagaat

SEQ ID NO: 41348 - DNA, 201 bp, Bos taurus
atagaaaaaaattcctatatgaaaattagaccatgctcctcttctgcttcaaaacatctaatggtctttcagtttaacacaatatcacatcctataatttkttccttatttgcctcttcagccagaagttcaatatggctctttaatacaagcactgtcaacatttaatgtcttcctcggatggtctagctggccatatcg

SEQ ID NO: 41349 - DNA, 201 bp, Bos taurus
ttttatgatttcacttgtctttgtcctgtttgccaaatccaggtcgaagaaccttgaagtcagggagtaattttcaaaagtccataatagtgcccacagcrgttagctgggtatagagggagccctccagacaggctgtgcttaattaattccttttgataatatgtaagacattgatagaatctgagctcttctcccagt

SEQ ID NO: 41350 - DNA, 201 bp, Bos taurus
atgatgtatgtagtagcactttgtgggctattgagctctataaagagaggacaggatgattattgctgttcctatgggtttattaataattactgatgaayttaaagccctaggatagagttgggaatgatatcccaaatttcaaatctagagaactcttggaaggagagaaggagagatagatgaagaattttattaaga

SEQ ID NO: 41351 - DNA, 201 bp, Bos taurus
ctcagtgactcaaggcattctgatgaccactttgtctctgctgcccacgatgacaaatgtgacaactatgccagtggcaccgatgggctcactgacactckgtctctgccattccacagcgcctttggcatcatggataacctctatggtggcatctcttgctgtccatgttcattttcaaacttccatctatacaatcta

SEQ ID NO: 41352 - DNA, 201 bp, Bos taurus
gctgaggagaaatggttgatgtataaaaactcacctatttaagttgatgattttttctaaggagtggctaaattaaataaccaggacaaaagatccatgcytctgctttttaaaaaccaggttaatattttcaatgtgattggtgtcattgggtatttccaggtgaaaggctaggcatgcagtcccttcagggaaaactgt

SEQ ID NO: 41353 - DNA, 201 bp, Bos taurus
ccactatgtctggaatctgataatattttaataaattgtagctgctcttacaccattaaccaatttggttcagaaactgtatgcaacacattttagccagyagtgtataacatgactcatctagctcaaaatggttttagatggcaacatgccattccattcttatgggggaggacaagcttcaatctacctatacacatc

SEQ ID NO: 41354 - DNA, 201 bp, Bos taurus
gtttatatactgtcttcttcatggagttatcctgatctatctggttggtattaatctctgggttctctaaaggtccatgtgggacctcatatttgcagtcmtgataatatgtcttgtttactcatctttcttccttaacaggttataagtgatgaagacaagtacaatgtcttattatcatttgtatgcctgcagtgatga

SEQ ID NO: 41355 - DNA, 201 bp, Bos taurus
ataaattatgatatattaataggaaacttttaacctaaatgaagatgtttacttgctatttatcactttctcattcagtcatgtcttcagcaatcacacaktcagtgcattctagacaatttcctaggcatttgctaaatatcataaataccatgcagttctgagaagtttctactgttaggaggcttactaccttatagg

SEQ ID NO: 41356 - DNA, 201 bp, Bos taurus
atctcttattttttctcatttagtatttggcctccttgatctatcggtcctaggaaacttgctatcattcagcatttttttaagcatacacgaaaatcaayaattgtcttccttcttttaaaaataggaatatatctacctaaagaaactaaagacctatatatagaaaactataaaacactggtgaaagaaatcaaagag

SEQ ID NO: 41357 - DNA, 201 bp, Bos taurus
ctgctctgtcttaaaaccccatacgcataacttccagaatgaccaccacatattcatgcaacacatgtggtatgcaatactcagagaatctcaaagcatgrtgtattcatcatgtatttatagtttgtttatagttcttcccagtccggctgtagtttaatactcagggttatttcttaacattagctgtgttgcctgtca

SEQ ID NO: 41358 - DNA, 201 bp, Bos taurus
ttgatctcacatgtctggcacctagcttgaaatgttgcccgtctcactgtgttgagtacctggtcagcaagctgggcctcagttcccttatctctaaagcrggcattacaatgccagtcattcatataggtgtttaaagtatatgtagtggtagcagttttattttaggtggggcctctccttggagtttgaaaagtaatc

SEQ ID NO: 41359 - DNA, 201 bp, Bos taurus
attcaccacatagtattggggtgcccaaaaagttcatttgggtttttctgcaccatcttgtggaaaacatctttattgaagttatctctgcctccttttcrcctatttctttcaaggtgatttaccctagcatatcagtcttggggaagaaaatccttcttcacagagcaagaatggaagggcagaaataattatgcttaa

SEQ ID NO: 41360 - DNA, 201 bp, Bos taurus
atggcagggaaaataatggcatttgagtgatgcataacctttcggtgggacaaaggtcatggctatgattcaggtcttaaatcttttagccaagttattaycatagattaagcacttataaaattatttaaaattctaatatatccagatctcttggttttgccttcagaattgctttacagtagtagactgaagtcaacc

SEQ ID NO: 41361 - DNA, 201 bp, Bos taurus
ataaagataagaacatttcagagagaagaacaaaattacaaaggaggaggaaaaaataaaatgtgcccaggaggcccaaagccgaattaaagcagtatttrtaaatggaatcagaaagagagggaaaactatctgagatatatttttcctgatgacaagtctctgtttatggatcaacaaaatagatgaatttgacctata

SEQ ID NO: 41362 - DNA, 201 bp, Bos taurus
gaagtttctcttctcatcacagatggcctgtcttttgagatacatttcacggtcctttcagtgcgtttccagagtctgaaaagaagagccgtcaccacgcrtgcgccactgtgatcctcacggccaggatcacgggcctcattttccccatgtgtttgcagatgtgctactttgatctacattccattctgacgtgcccgc

SEQ ID NO: 41363 - DNA, 201 bp, Bos taurus
gattaaaagttggtgattttttaaaaagcagtgtgtagaaaagaatacagttctttggcaagtctgaataaatcaggagcagctcggaaattattgaacaytgagaggaaaatcatggctctgacaagcttcaaattgttcagtcagatacttaccctctccaccctgcctccagctcctgatctgaaaaaaaatgcaaaa

SEQ ID NO: 41364 - DNA, 201 bp, Bos taurus
caagatgggcctgtcagaacccaggggcagggtgagggagaggaggggtaaggagaatgcttctagaggagcctggaaaagcagaaaagtctgaggggagyggggcagagcaccctggcccaaaaaacccttttaaagattctcttagattctcttcctcatctgcagtaatatagaacaaagacagaccaaagaatggtg

SEQ ID NO: 41365 - DNA, 201 bp, Bos taurus
aattaaatctcatccctcactgcatctaaacccaagaaaggtggtctcctcttcctcccataaatccccccatcccaggcctctctctcactggttccccraacatcctgcagtgtcacatgtgaatgcagctctgggctctgacagaggggccccttggaggccagagatgggatctctcattcccatgttgatgctgcc

SEQ ID NO: 41366 - DNA, 201 bp, Bos taurus
tgaaagtactttggaaccttataaactgtgacgagttctggttttgtttttaagcttcatattaatttgctagggccactatagcaaaatagcacagactrggtgttttaaacaacagaaatttttttttttcataactgtggagactagaagtccaagattaaagtgccagcaggtttggtttcttctgaggccactctc

SEQ ID NO: 41367 - DNA, 201 bp, Bos taurus
ccgagacctgaggctatagggtaactccctgtgtccacaggttgatgatcaatcatgctcacttactcacccatccttttcttcactcattgattaaatayttattgagcgtttgctatgtgccaagcactggaatccctgtcttagtcgcctttcctctgagggttcaaacccagtcttcagcctgggccaaagctgctg

SEQ ID NO: 41368 - DNA, 201 bp, Bos taurus
ctccctccctccactgcatggcagaaccagcctctggttccctgagtgttttgcacctcttgcttcctggctagaaggcctcctgggctcaccccctcacsgaggagatcactgcctcagatacccataacaatgaggctggttcacgggcaggctggaggaagctcacttcacaggactgccctcgtaacaattaggccc

SEQ ID NO: 41369 - DNA, 201 bp, Bos taurus
agaccgagaagaaagaaggggccccggagcaggggggatgcagagcttagtgctcacatctgggggtctcttgtgaaaggctgagagcagagctattcagyggccccgtgtctgctgggtgttaccagtttgactgggatgccccatggggatttgggactgagtggtacaaacgtgagactagtgttaacaggcacctct

SEQ ID NO: 41370 - DNA, 201 bp, Bos taurus
attgattgtagtaatccaaattttctggattttccctcgatgacttgtgagggaaaaactctcccctagtcttttctcaggactttctgtgagactccaarggcctcacatgttctcaacaagaagtccgctctggtccctttacatcacactccttgttaacattctctcttcccacaagcccataggaaggcggcacca

SEQ ID NO: 41371 - DNA, 201 bp, Bos taurus
acagctaagggctcactgtgcatttgagcatcctccagaaaggggtgacgcagggaagtgtacatccttcacagtgcgcagaccaaggccaggaaggtgaygtgagttttcggagggcatcccccggtgagaaggaatcaggaacgcgttctcctcttaggccatctctgtctcataccagtcaagccactgaaagaggat

SEQ ID NO: 41372 - DNA, 201 bp, Bos taurus
acgtgtgtcccatgcaccttctcacatgttctcactgaccattcgagggggcatttgtgcccatttcagagatggaaaaactgtggcccaaagacgcttgytgttgttgctcggtcactaagttgtgtccgactctttgactccatggactgaagcaggccaggctcctctgtcctctgctaccttctggagtttaccaaa

SEQ ID NO: 41373 - DNA, 201 bp, Bos taurus
gtgtgtcaggtctctgtaggtctgcagggagtggcatgtgagtgcatcatggtctctcttctctgaagaagcagggaagaggccttgcacgtgcagtcctrcattcatttatctgttcagccaccatcccctgatcatcttctctctcccagtccccatgctagggaagctgagatgaactgaaggccagtcctccagggt

SEQ ID NO: 41374 - DNA, 201 bp, Bos taurus
tcagatggcagggcttccgcgcccaccgtgtgaggcgggggctggtggcggcgcccatctggcaggatccttcttgaataggatggaagatagttgggccygaagaacacattttgttttttattttcaacccagaatagacatgcctctcaaatgtcatcttgatggaaggggtccttgagcaatggggccctgaacgtt

SEQ ID NO: 41375 - DNA, 201 bp, Bos taurus
ctgaaagtacagagggaggaatgatcttaaaagataaattcctcattcagtcagtccagatattcaccataagttacaaaaacaggcatttaggccaaatyagtctttagaacactgttgcaactggatcagacagtttactgtggcagagcatacgaggaggaaactaggagataggaaagaactaggctgaagactgaa

SEQ ID NO: 41376 - DNA, 201 bp, Bos taurus
gtcagtctatttgcatttggcaggactccatggtgtcccctgaacaaatgaatcagcctgtttgggggatggggaactgaaccatagggaggctgctagcrctgcttgtgagccccagtgatcctgagatgggggaatcccagacagttcttgttctgttcgtatctggattattcttaggctctggagtaacaagcccct

SEQ ID NO: 41377 - DNA, 201 bp, Bos taurus
gcagaaaggcttctttggcgctttgtaagatcgtgatgcatcaaggaaacattccagagaaatgtagataatgccagcccaggccgggagctcagggatgmgtgagcagttcggtaactggagaggagacaccagggcagcaggaggctgggacaggagctctcgtgttctgaagagaaaagagtttccatctgctgctcc

SEQ ID NO: 41378 - DNA, 201 bp, Bos taurus
tgcaggaccaggggtcctagatctagtgttggtctgctggtggggggggccagttcctgacatgcctttctgctggatctagggtgtcctaagcttaatgktggcccactggatggtggggctgtatcccagggacagctggcttagaagtaaatggagccagctcctgacatgcctttctgctggatccaggatgtccca

SEQ ID NO: 41379 - DNA, 201 bp, Bos taurus
ttgtttattcagttacttaggatatattctgtcttctgtttttaccacaggcaacttcagagtggaccttggattaccctcccttttttgcgtggtttgartatgccctgtcacatgttgcgaaatattttgatcaagagatgctgaatgtccgtaatctgaattactccagctcaaggaccttactcttccagagatttt

SEQ ID NO: 41380 - DNA, 201 bp, Bos taurus
gcatggtacccgtgtgtgctcagctgcatgtcccgcagaagactggggatcatcaccacctgctccatgttgcgcaccacggccaggtaccggtccatgayggtcagcaggcagttcttggggtagcgcttggtcagcacctgcatgatggctttatcttccatatggagtcctgcagactgcctcggcctctgtttccag

SEQ ID NO: 41381 - DNA, 201 bp, Bos taurus
gaaattgtattttttttcccaagatctcctgccccagttattcacctgagaagcctaggaattgagggcaagattcttaatatttagttcctctgttctgyctgttggtctcaccgtccttctgctctgttgacctcaggaattctgctgggccactgatgacctcctccccaccactgacatctgtctctcttctcctcc

SEQ ID NO: 41382 - DNA, 201 bp, Bos taurus
ttaagcctcttttttccctgtttctttatttcccttaagcatgtgtggtttataatggaaatttttaatttattggcaaaaataacaacaaaatgagttcytcaaattcagtgtgggactggagataatctggctcctggaaaagcagctgtgagctctttgggttggcaatgcttcctactaatcactagctgactcaga

SEQ ID NO: 41383 - DNA, 201 bp, Bos taurus
ttctgcaaaagggtctaacatgcagcctggcctgcagctgaacaaagaattgagcaaatatagaaggagagctagctggctacttacaggcccctcctccrccagaggcagagaggcaggcatgccacagccagagccagaaggcaaggggctgccacaatcttgggccctgagacagcatcttccaccaaactgtgagga

SEQ ID NO: 41384 - DNA, 201 bp, Bos taurus
tgccataatcagcatgttagaagtttccatggcttatggcttccataaggataagaactcataagcatcctgaatctaaatatcttccctggcacgtgatmaaagagaagataaaagagagaatctagtatttattgatcacatactctgtgccattgaataaaatagtgattaagaacacagaagtaatggctggattta

SEQ ID NO: 41385 - DNA, 201 bp, Bos taurus
tttcccagtttaaaatggcccgctgcgcaggtgcttgtctttgattagagcattctctttcttgctatctgccattgcttcccaggtggagctgtatatgycccattcatatgaggtggcccatgctgtactgtgagatgcctgtttttaaaagtcatcacttcatagctggaataatttcttactcatggataattttta

SEQ ID NO: 41386 - DNA, 201 bp, Bos taurus
tttcccttcacttgaacacttagagtattgttattattattaattggcctaatttcaattttgttctgtctcaggaaatagggaggcccaaggagaggaaragagaagtggagacagtcagtcagtggagcagtcacataacacacacatttagcagttaagttcaatatctttataggcaaggttcaatactttggccac

SEQ ID NO: 41387 - DNA, 201 bp, Bos taurus
ccaaaacccaatacataggccagccccatagaatgtacaatgccaacagtgaacataccactctggtgggggatgctgataagggtgcaggctatgcatgygaggccaggaggtgcatggggaaatctccacatcttactttcagtttggctgtgaacattaaactgctctaaaattttttaataaaaaatagccatcgta

SEQ ID NO: 41388 - DNA, 201 bp, Bos taurus
attgcttcagataagaatgcagtaaattgtgtgtagcaatgcctgttcatctcttttagagttccctgttgggatccaaagaattaatttgacatatatcmgataaaaagcagtagaaaatggagacatgcctagcactgttacagactgtcaagttaatgtgatgagtcgatggttaatgtaatgtccccaccacttttc

SEQ ID NO: 41389 - DNA, 201 bp, Bos taurus
ttaaaggaatgacaggaagcatgtttatgaatgactgaatggtaaaatattcccagattcatgacttgcatggaataagaatttaataaatattggttctyatcataggaacacctttgtatgactctaatccaaaagtaaatgtgtcagagaaaagtgagaagttattttttactgttttcaacagaaaaactaaagaat

SEQ ID NO: 41390 - DNA, 201 bp, Bos taurus
taaactaactatgtataagagaatagtctggaaagttttaaggtagcattgaaagttttttttttttttttttttccctcccccagatgccagtagcaaayagaaaactgcaaccagggaggttcaactgaaaaaaaatcatattgtcatgtttactaaaataattcctgcttagtagcaagatctaagatcaaacagagt

SEQ ID NO: 41391 - DNA, 201 bp, Bos taurus
cttcactaaagtaaacaaagagattatcttctttatagtcccacattctctctgcagaggtgtctagggtgttttgactctgtcctcaattatctataagyggccacagtcctgccttcctagttggcttttgtgaagcttgggcttgtttcctaaaatgtaaaattttactattaaagtcaaatatctcaaagacatttg

SEQ ID NO: 41392 - DNA, 201 bp, Bos taurus
ttcatatattttttcttcttgagtgcatcacttagtgctttgtgaatattaaaagaatctaataagtgtaacaggacctccctgttgggccagcagtaagractctgcttaccaatgcagaagacaggggtttgacccctgggtcggaaagatcccctggagaaggaaatggccatgcactccagtattcttgccaaggaa

SEQ ID NO: 41393 - DNA, 201 bp, Bos taurus
gggggtagaagtaaaaatgattttgtgatcaagctcaaataactagattggtgggatgcgacaattaaagatctcagagaatacattttcaagagtagatkaaatgggataataagaaataatgtagagatcaacaaggcttaccaattcttattcacattcctaggtctgttctatacacaaaagatcttactgaagttg

SEQ ID NO: 41394 - DNA, 201 bp, Bos taurus
cattgtacagaagcatgtgaagcttaagggtgagtcttctgttataattctttctgttctacccttgattgctaggcttaacctcattttgatttctttaygttacttaacaaacgttgtcttcctctttaaatcagtgcatcctccaccaggaaattcattctgtttctttctgaccactacttcattctctgttccatt

SEQ ID NO: 41395 - DNA, 201 bp, Bos taurus
cttatttgaaacttcaaagtccttgatgtgaggagtgctaggatccatttattcctgtatctgtgacctctagaggagtcatatggcaacatgaagttagraaaaatcctttgcccaataaagcaagacgttatttgactatatagtatatccctcaccacaccgtgagaattaagtattgtctgaaaatgaagagggact

SEQ ID NO: 41396 - DNA, 201 bp, Bos taurus
tgaggccctctgatggagacttggggctcctgcctgcagccctatgtgccatcttgaagtatgttccccaggcttacttaatctttcagatgactcaaccrtggccaacatcttgactgcaaaacgatgggaacccctcacaagagccaccctccaaggccactctcaaatttctgatccacaaaatatgagaggttttgt

SEQ ID NO: 41397 - DNA, 201 bp, Bos taurus
agtcttacatttaggcctttaatccatttgatattatttttatatatgatgttaaagaatcttctaaatctgtttgtttcttttttttttttttacatgtsgctctcagttttctcatcatcacctattgaagagactgccttttctccactgtatattcttgccttctttgttgtatttcaggtgaccataagtgcttga

SEQ ID NO: 41398 - DNA, 201 bp, Bos taurus
atcctttgaatgtgtctgcaactctcctaacattttccaaaaagtcaggcctctccagcagtcccatggtgccgttagaatagaacatgttccttgcctcygccttgtgtttctttcaggtcacttgctggcagctgggcattcatgcacagcatcatgttgaaattttcagatgagggctgtaagaacagcataatggag

SEQ ID NO: 41399 - DNA, 201 bp, Bos taurus
ttttctgagataacagataggattagatgcgccagagacttttggagaaactatatttgagaacaaatggaaaagggacaaggaaacagaaagaggcctcrgatctggggatggaggagaggggggtggagagagactaggaggaaggctccaagctgctgcacaggataagaaatcttctgccaagacaatgcaggccag

SEQ ID NO: 41400 - DNA, 201 bp, Bos taurus
tcagatggaaacttgggtgcgaacctcccttgtctctcacagcctgtcactgcccctagcatccgccactccctccctgctctggagcctcaccagagggygggtagggcctttgtggacttgcagagtaattcagggaatgagctgtggggaagcagccaccatcagccaccttgggttgcttctgaggtgctgcttgtg

SEQ ID NO: 41401 - DNA, 201 bp, Bos taurus
tttggtttctactgagcaaggtgagtgataaaatctttaaacagtaagaagctctgttgtctgatagacagggactatgaagaagattatttatctttttmcaaggccttttgtttaaatgaataatactctgagaccttaacagataattttatagttagattggatcctcgtatcaagaaacttttccaggtctgaagt

SEQ ID NO: 41402 - DNA, 201 bp, Bos taurus
tgcaaagagtcggacacaactgagctactgatctgaactgaactgaatgcatggtacaagactatgctattgtgtgacactggcaagttttgaattttatktatacttctctttggctctgtcatcttagtgaagtttgaagttttcccaatcttagtttccttgtatgtaaaataggagaataaatgcacatgccttcta

SEQ ID NO: 41403 - DNA, 201 bp, Bos taurus
tgttatttgaccttttattttctctctgctgtttctccttttgcttttttccccctctccttatgccctgccatactggctttctttttctgtcacttaarcaggccagatatatttccaatcagcccctctgaacttgatataacatatgcataaaattcacctctcccaggtcagcctatagctgtcttcttctcattg

SEQ ID NO: 41404 - DNA, 201 bp, Bos taurus
attatttattgaatgagtaaatgcatgaaataatgaatgaatagattctgttccagcttcaagcctcaaaattaaagtacctccttaagaaaagatgctgraaaaaaaatcatctttgaatcacacttaataagcagtgacttattaagattccttttaattattattgaaacctgttcttcaagatgggcttccctgatg

SEQ ID NO: 41405 - DNA, 201 bp, Bos taurus
tttgatggctttctttagtcagcatgaaggtgcccagactgtaaaattagcatataagatttatgctttagaagtttccatcatggccctaccatgagcastcaattacatagggaaagaggagactgtgtggttcatgggagggagcaattcggcacccttcttgatcattctcagaattcttggattcatctagttttt

SEQ ID NO: 41406 - DNA, 201 bp, Bos taurus
gaatatggggcacagcttcatgattttctcactaggtgtttttaacatttaatgagacaacttgttcacgatgtgttacaatatagcacagaggccaaggkaggtcaaagggtagaggtataatttgctgtgttttttgaagctgactttggctggttcgtgtgccttcgtttctggctggagacagaggcctgttttcca

SEQ ID NO: 41407 - DNA, 201 bp, Bos taurus
gacgatcccattaacagaaaaggaaaatgaggtacagagatactgataagttagctccacagccagtaagtgataatcaaatctaattgatttcaaagtcyaagggtgcaccctttttttttcccttgtgaaccacctaccattctaggaatgcagatttcaatcaaatataaagcaagattttccaaaaattagttatac

SEQ ID NO: 41408 - DNA, 201 bp, Bos taurus
cagtaagcaaccttagtctctcttttgttccaaatgaggtaaaaataaaagattctgaatctctttctacatgttctgcttttcagtgataaaaactactraattattgaagtctcagttggttctataatggatatattttaaattgtgtgttcacttttatttaaaatatcattgtacccttacaaatttaatggactt

SEQ ID NO: 41409 - DNA, 201 bp, Bos taurus
ggtataatatttattagtaattatattaataattaaaatcattaatgttaagtgtgcaattaaataactttatgacataaatagttatgtaacaatcaccrcattcacaaactggaacatttgccaaaactattccacacatttgaagtcaattcctttatctaatccactagcctctggcaattactgatattctctcac

SEQ ID NO: 41410 - DNA, 201 bp, Bos taurus
atttaaaatattgcagttatcctccttttcctcactagcttattaatggtaaagtagataatatatagtgcctattacttaatagatgtttgaaaattttrcttccatcctacttttaattcagattttactttgtgagagactaagtagattcagctcttcatatattctttttaattttaaatatcttttgctttctct

SEQ ID NO: 41411 - DNA, 201 bp, Bos taurus
ataagggttctcctgtccactgcctttcaagccagtagaatgagattgagtttggttcaaagaatggagaggtgtgaactgatgcgctagagcacatactmtcttgataggccattgtcagagttgcttttaagggttcttatcatcagggagtgggtagagtttacctggggcagacatatgctcaaatcccagagcccc

SEQ ID NO: 41412 - DNA, 201 bp, Bos taurus
tgtgtataactgtatgcttgtatgtgtgtgtgtagtaatttctcaatctaaatcaagttattagttggaaggggctttctaagttttggtataccatggakatatacacttacgtgtataattgctcttctgcttgtatcaaatttttggaaaggcttttctcagttttataatttctaggcattatccaatgaccttgaa

SEQ ID NO: 41413 - DNA, 201 bp, Bos taurus
cttatatctatcttaaaaaatacaaaaaacaaaaggcaattctccctttataatgcatctatttctaccctgaattaccctgctcctcttcaccttttcayttcaaggttttttagttcctaccatttcactggaacagcttttacttcgtccttctaagcgcatgatgaattcctcttttttcctcctattccacgtgag

SEQ ID NO: 41414 - DNA, 201 bp, Bos taurus
ctcacaagagtagagtcaaatttagtaacatattatcagagggtcattgattatttgcaaattcaataggatttagatgacagagcagttgagggcaataycttcaaatattttggctatagctcagctggtaaagaacctgcctgccaatgcaagagatacatgagatgtgggtttgatccctgggttgggaagattccc

SEQ ID NO: 41415 - DNA, 201 bp, Bos taurus
ataatgggtttccagttctggcaatgataacaagtacccttgttgaataaatttattcaaataaaaagagtttaaagaggaattataagcaattgactatrtgggtgcaattcagatcatgccatggatgtagaagtatttttaaggtatcacttggatgtgttaagattcaaaaattcttgagtaaattcttgagtacct

SEQ ID NO: 41416 - DNA, 201 bp, Bos taurus
ctttctcccaggtcccagtggcttccaataattccttgcattcctcggcccataaacttcctaaattcaatctctgccttcaactgttatggcctgccacrtaaggctgtgtgtcagttctcccccttgtttctctgataatgacaccagtccattagatttagggcctgttccagatccaggatgatataaccttaagat

SEQ ID NO: 41417 - DNA, 201 bp, Bos taurus
tctttctgacatcactttggcaatgataatttattatgtacctactatgtggactgtactgggctggcccttgaaaaaggtctaagtcagacaatgtcatmgagaatctcaaatttaataggaggggcagataatactcataaaaagtttataagatttcactgtactcagggaaccaaataaactcctcccaccatgatt

SEQ ID NO: 41418 - DNA, 201 bp, Bos taurus
ccttgctctttgggtaacacacaaattttctagcaggacaagaggtgtctggggaaactgctaaaaccattaggaataactgggatcttgttgttaggtcytgggaccttagcctattctgggtgttgatcacagagcagatggtctcgtgggaaaactggacccaggatgtggctcaggtaggagggatatggatactct

SEQ ID NO: 41419 - DNA, 201 bp, Bos taurus
tcagacactactgaagcaacttagcagcagcaaaaaaaaaaaaaagattcatatcatttaccaatatcatgtcgcattgccatggccactataatttcacrtaattcattggatgggacttccgtgaattaacataactcagcttgggaagaagggctatggtacagcaccgactggcttcaaagtctggccctgcccacc

SEQ ID NO: 41420 - DNA, 201 bp, Bos taurus
gccccaggctggctggtggccttgtcagtaaccttggtcaccaatcagaaatcaacaaggagcacagcctcatgccctccccaaggccaggagagggatgycggaattgaaaggtcatctttcaataacaaaggggcacacaagggttcacaggctttccccccagataatcaaaatgtctaagtctccaaacccatcatt

SEQ ID NO: 41421 - DNA, 201 bp, Bos taurus
gctccatccatggactggccgagaggaggactaaggcccaaagattctttatgagaaccagatgccctagtgtacttcacaaccaacacacatgccacagragcctgggccctgcaggggtgaggacgctgcttcagcttcacaaccttcatgaacagagggttgtgacatcatggcagaggttgtgacctactagggaca

SEQ ID NO: 41422 - DNA, 201 bp, Bos taurus
tacacaaaccaaagattttaaaaagtcatcacaggagctgatacaaaaggaagaagtcatagtggccaaaacaaactcatggccagggatctagggaggcragtgagcatcaaagcttcatgatgtcagccaaaacatgcagcctttgggctcccaccttgacggctacagaggaggccagggagacagataacagggtct

SEQ ID NO: 41423 - DNA, 201 bp, Bos taurus
acactttgcctgagtcagaactaggtactttcttactctccatttggaaccttaactgaatttagccaaaacatgggaaaggtttctgggaaaataaaaamtgttggctgtaagccaaagccctctaagttcttatttcagactgcccttatttatcttatatgtatattactttttatatattctaactgcccagtattt

SEQ ID NO: 41424 - DNA, 201 bp, Bos taurus
acactggagggagaaagctaagaaaataaatcaggagaaaatacagctaagaacatgcagggagaaatgtgtctggaactctcaggcaacagagaaagaayaagtatagagagcaccgaggacgtgtgcaaggaggggagcagaggagtttaggcaacaacagaaagggtctggaggaggaaacagaacaggctctatctt

SEQ ID NO: 41425 - DNA, 201 bp, Bos taurus
tcccaacccagggatcgaacccaggcctcccacattgcaggcagacactttaacctctgagccaccaaggaagccctggtcctgccagaacactgatcaayaggcctgatgtggtggaaagcgtgaactttgaaatcagacagaagatttgaatcttggccacttaaatagcttatgtgaccttgggcaagtccaggtaga

SEQ ID NO: 41426 - DNA, 201 bp, Bos taurus
gagaaagaggtgggggggtggggacgctagggtgggggctgtgaggaaatggttcatggagagggggggcgcaaggagtaattaggctgacatatgcaccrcccaggacccaggagccaagccagggagggtcacttcctgatttacccctggcgttggggcacacctctttgcagggtagaagagaagtgtgcactggga

SEQ ID NO: 41427 - DNA, 201 bp, Bos taurus
caatcaaagacaaaaagactcaatgagatgcagaaacattaagtacaactaaatctcacacacacacacacacacacaccccttcagccccaggccactckcaagtctctaacactcagcacttggtcatcagccaaagcatgtttggttttcccaaaccgcaaacatgtcagggagcggaggaccaaaaggaagtgcagc

SEQ ID NO: 41428 - DNA, 201 bp, Bos taurus
gtaatgcctgaaatgccagctgctaatatcaactcttcccaatttaataaaccttggcatcacaaagttggcaattagatttcctgtaaaaggctaaatgyggcggccttctgcttcctggattctatatttcagtaagaaaggcattagtgtgtggcagctgggataatcatttaattgatcttttccatctatggaagt

SEQ ID NO: 41429 - DNA, 201 bp, Bos taurus
taaagacttaggaggagacagatggagaaagaaacagacgcaaagatgaaggcaaagaagaaggaggtgattttgcgacagagcctatgtggcccacaaarcctaaaacagtttctgtctggtgctttacagaagtttcagttcagttcagttcagtttagttgctcagtcgtgtccgactctttgtgaccccatgaactg

SEQ ID NO: 41430 - DNA, 201 bp, Bos taurus
ggcaatagcagccacagcttcccaggccctgttggggaactcgggctcctgggctgcccctgggggaactggtctggatcagggtaggggtgtggcctgcycgtggtgaatttgtctggatcagggcgccggtgcctctcgattctctgctatctggacaccaggactgaagtatcatcactcctactatctagagatagg

SEQ ID NO: 41431 - DNA, 201 bp, Bos taurus
atttcagccaggaaatggaacttatggccccacagggccaggtgggaagccctacagtgcctacagggagccacgtgaactaacaccccactatcaccccrgacatgctggccactgggggcaccctggcttcccctgcctgcatcccctaaacccctgctccctgatcccagccctctcactcctgacctttctcagccc

SEQ ID NO: 41432 - DNA, 201 bp, Bos taurus
tgggcagagggggacaccacgcactgctataaaccctggtgaggaaaggggaacaatctgtgaaacaaaggctatctcagaagcggccaactgcccacctyttgttgatgtatctaaaaacacaccttgctccagaaaaggtgcacggggctcagtaagaaacagttgctctgtgcagtctagggtggggccctgcccggt

SEQ ID NO: 41433 - DNA, 201 bp, Bos taurus
caaagagggcggtagctggcatcagggtgtagctctgtgatggtgcaccttggtaccccctgtaaaaacgaagcttttacagcttcccggccctgtgtgtytcccaatatttcaaaaagtctggacagaatggggcgccagcctgaggaacgtgggactgtggggtgcgtgggcggccccttgaacttccggccccccggt

SEQ ID NO: 41434 - DNA, 201 bp, Bos taurus
ccaagggaggctaaaatctgaaacacctgtacagccactttgaactctttatttaaagaaatgtctactatatctgacttgaaaagcaatgaacagttccyatttgggacagctttcgttcatattgtttctttttaagagaaatagttatctgtaaaagattttggttaaaaccaaaggaggattgcatcatgcctagaa

SEQ ID NO: 41435 - DNA, 201 bp, Bos taurus
acctcagaatagtagttttaagtaactttaaagcttgagctccttttgaatttcccaaagagtttctgcagtttctttcaaatgggcctcatcttcagggktcagctttacctttacgaggtctgtagtgccattctctccaggacgcatggaacactaggtatagtcttcatttattcagtagtggccctgaaagtaaag

SEQ ID NO: 41436 - DNA, 201 bp, Bos taurus
taatcttcgtgtaaggaattttagttggtctcaaagactgtgcaagagagggatattggtgtgtcgtttcatttccttcggctggtctaggcctcagactratttaaaagctgaaacttcggagaccagacccacctggggggcaagggggcaagctcgaagccttcgtgggaaagaactctcaggcgagcacctcctgtt

SEQ ID NO: 41437 - DNA, 201 bp, Bos taurus
gggcctggagaattccatggactgtatagtccatgggtttgcaaagagtcagacaggactgagtgactttcactttctcttgatagagcgttatttctctygtataatcagttgaaacctttttactgttaactgccacagaattgaggtacctgctgtagaagaggaggactttggcagtcatgtaccactctttcacaa

SEQ ID NO: 41438 - DNA, 201 bp, Bos taurus
acttctgtcctgggccagaagtttcctccccggtgcatgaagtcaagaggacgtagagtgactgcaggccaccctcatgactgagagaggcccatccactrgggagaaagaagactgtgctttagggacatgagacgcatgtgatctcttgctaggagaggtgcgagggtggccaggccaggtgggtcagcagtggctcag

SEQ ID NO: 41439 - DNA, 201 bp, Bos taurus
tattaactattaatcggagacaacagacactaacagagatcatcttgcaaaccaggacacagcttcacatggagactcctgggaaatcccttaaggcctgrggattctgaaatcaccatgacaggatggttttcttttgcgggacaaacaagtgaaaagagctgaccgcccctgttgtctattgttctaagcatggccctg

SEQ ID NO: 41440 - DNA, 201 bp, Bos taurus
tctgacttgcgataggttggaatctagaaagagagtcattttctgatggcatatgcataatttaaatgaacccagatacagggaggaagggatataggcaygaaggccagacattaacatgttagacgtgcagttgtttcccattatggtttagtttcattttcatttctctggtgaataaggatttcagtatctttttag

SEQ ID NO: 41441 - DNA, 201 bp, Bos taurus
ttatgttgatgggagagaactgaattacaagtggattttgaatgtcattttaacacatgaaggaagttaattagtataaattatttgtgaaaatttatttyctgatgctggatttagggtgtttaaaggctcatattcataattcataaatcatcatggattcaatcaagtctattagaatgtgagaaccagacacattca

SEQ ID NO: 41442 - DNA, 201 bp, Bos taurus
ggacatctttgttcctcaaactgtagatgaaaggattcaccattggccccacaatggtgtaaaaaactgtggacactttctcttcatccagagactcagcrggaaaaggcttgagatacatgaatgcagatgatccaaagaaaagagaaaccacgattatgtgggagctgcaggtactgaaggctttggacctgccctctg

SEQ ID NO: 41443 - DNA, 201 bp, Bos taurus
agagaaggagtcatatccttgaggaggccagactgaatggcatctacaaccaaattgtggggtcaagtgtcttggggtgttttttctcccactccaggccyggctcttccttttctgtggtctcactagtcactgattgaactgggaaactattgtgtgtgcaagtgaaacatggtgagaaacaacactaaggaaccacca

SEQ ID NO: 41444 - DNA, 201 bp, Bos taurus
gtacaacaggtctctagaatttattcatcatgccaaactgaaacttcataactattgaaaaattggagtgtgcataacaccttcaaattcaagtgggatartgaacccttatacctggtggtctcttgcctaaatttcaggacagtaatcaaggcacatagataggagctaaaccttagggtctaagaacgccctgaaaac

SEQ ID NO: 41445 - DNA, 201 bp, Bos taurus
tgtgcctggaggagacagattgtttgccaaaagaagtgcaggatttcattaacttacatcaactcctgtaaagagttctggggaacatgcatttaactagrttctaaggttgctagacaaacaagaatgtaatcgaaggcctaattacctaaaatattttgaaatgggtgctcaactggaaaataggatgtaatgtcatgg

SEQ ID NO: 41446 - DNA, 201 bp, Bos taurus
cccgccaggttggtgagtgaaaggaccaagactgggccaggtcccggggtgtgtttgtcaggaaaagaaaaacagaagttgggtggtggttaaaccctacygagagaggcccaacttgtcctccagcctctgtcctcgaccctcccagcagccttccatgtcccctccccagtccggttgctctcatccccatctgccagc

SEQ ID NO: 41447 - DNA, 201 bp, Bos taurus
aatctgaatgcatattttggccaactcaatattagcatttaatcctttttcttttgaattagcatttctctgtcataggaggatctgtaaaacagtgcccrtggccttttgtcttaagctggggaggcatatttatagagccagttctacttatccttccttgggggctgcccgagtgcatcactagagagtaagaacatt

SEQ ID NO: 41448 - DNA, 201 bp, Bos taurus
ttttctctctggctgagacccctctccacaagaaagatcgggggccttcatttcctatcaaaggagagtcaccctgcagagcatcccctccagccactgtrtatcctttgttgaggattcagggcctggacgagagctggcctccctcctccacctgtgtgtctggcccagaactgcccctgctttccgtgaaacagcagc

SEQ ID NO: 41449 - DNA, 201 bp, Bos taurus
gggggctcccggggccccagcggccgcgactttgatagtacattggctcccaaccagtccatggaattataaatgattaaccgttatcagcgcacatcttyacctctgtgtaaaaatagattgactgtaatgagtatttgaataaatcataagaatggccaccccgcgatcgtctaacatcctgccgatggctgcccggtg

SEQ ID NO: 41450 - DNA, 201 bp, Bos taurus
gtgcacgatctcaaagatgtctttggacataccaactttctctgttagactatgcactccatgagggcaggaccaggactcattcatctctgtactgcttrggggcctagcaacagagctcagcacatggcaggcaccagatagccagaaatgcaaaccatttctcagggaagtaattgattaagtgaagccaaactggag

SEQ ID NO: 41451 - DNA, 201 bp, Bos taurus
ctatttctctttcctccccctacccttcagcgctggcctttctgcttcgctcatgaatattcagaagctcaagatgcgaacttgcagtaactcccagtgtrggtttctcactgggagggccgggcactgtagcttcaccatgaaagcgtaggcgggtggccgaatggatgggcggggtgcgcaggcggatgcccgcagtca

SEQ ID NO: 41452 - DNA, 201 bp, Bos taurus
tttttttgctttaaactgctctgctattgtctctcttttgggaagtacccagactgccacatcttccagttcttcacgtttaaacaaccgagacttgaatracacgaggttgtgttttgttcactggtgcaggctgggaagttttttgtttgggttttggttttagaaacctctgtgctgataagtttctcctacttctgc

SEQ ID NO: 41453 - DNA, 201 bp, Bos taurus
atgtcatacttgagacattttgaaggacataccgttcctacagctaaagaacatgtcattaaatgagttcacgatagcagattcctattatctctagccamagtaccatatgttcactgatgggtcagtgaactgtcagagactgacagtgcctgaaccagtcatagttttcagtggtttacccatggtgaacctcacctg

SEQ ID NO: 41454 - DNA, 201 bp, Bos taurus
caaaaggtatctgcctcccagacagcctccatcccaggtctgtgtacagagaatcctactttcccacctggcaatggtcccagtctccctccacgtgttgmgtccagggatcatggccaccactgatagtatcttttgtctctttctaaccccacttacctgcaacacgatcataatagtaaaagttgtctgtgacacaag

SEQ ID NO: 41455 - DNA, 201 bp, Bos taurus
aaattcacccgacatcctcatcctccaataggtatttattgtgcatcctgtaggctacacactgaggaggagagatgagtcacatgtaccagtcatttccraattcagagcctcacggctgagactctgaattagcaagctttgttttaataatggtgtttgcttaaataaggggcacagaggagggacccctagcaccat

SEQ ID NO: 41456 - DNA, 201 bp, Bos taurus
cgaagggccggcgtcccaggcctgggggcaggggcttgggagaccatggctggtgacatcgagccggagagcaggggccggcggctggggggcttggaccygggggtcctctacgccttccgcgtcctggctctgaatcatcgtacggctggccatccctctgaggtgaagacaccaggtgcctgggcttgcgtcgtggag

SEQ ID NO: 41457 - DNA, 201 bp, Bos taurus
tgagagccgcttgtctccagcctggccctctctaacaagctctttttactcggggcttctctgagtagagacctcaaacaatagcagctttcaaggggctyggcccctcctccggcggcttccctctcccgcccctcggccctgctccgccctgctccctggcctctctgccttgtccacctgaacgtcccacccagtccg

SEQ ID NO: 41458 - DNA, 201 bp, Bos taurus
ttctctgctcgcagcctctcctctgatggcctttgtgacaatgtttcagcaagagcagggctttacttaagggtaagggtttatgaggggggatcccttcmacagtcatttcgtgaacctaggccatgggctgcgcatcgtgtgacagtactcagcgagcagagtcagccccctgtcctccacctggagacactaggaaac

SEQ ID NO: 41459 - DNA, 201 bp, Bos taurus
caaaaacataatgctaactcgagaagccagacacaaaggccacttattttaagagtctatttgtatgaaatatccacacaaggcaaattcacggagacacraggctgatcagtggttgcctgggcctggagatgggtgcagagactgacaacagatcttttctaggaaatgacttaatagtgggttatggccatggttgta

SEQ ID NO: 41460 - DNA, 201 bp, Bos taurus
agatcacctccgtaaacgaccatttagggcaaaagtcgtccacagccaggcagaggaacccccgtccggccctgctgcctccttgctcagaagccttttayaaaggcagactccctggaatggctttctcagctcagtccggggctgtgagaaaaatgacttccattccctgcacggctggagccttgggcctttgccaca

SEQ ID NO: 41461 - DNA, 201 bp, Bos taurus
ccacgggctggttctaaccccctgttcttgtccaaggcgccttagggaaggtccactgtttccaggaagctccatggaagcccttgaccctgagggtcttraatgtgggtctgagaatgaggctgtgaccaggtattaggactaactcgctcacagcgcttggcaggcttagcaacctgtcagacacaagctcaccgcacc

SEQ ID NO: 41462 - DNA, 201 bp, Bos taurus
gtccatacggacgcagagtcagacacgatgcagtgactgaacagcaacaacctattaggttataggccaggagtctgcagagggcccacattcaccccagmggtaactccttggtctttcctggctttaaaaagacagctcaaccttccagatattaatcaggatggaagaacatgttgagagacatctctagctcactgg

SEQ ID NO: 41463 - DNA, 201 bp, Bos taurus
gtgactgacgctcatctgtctccatttccatgactgtgctaataaagtgcgcatcgactatcactgtagagatggcttacatttacatagcccctacctcyaaggctaacaacagctatagatttttataaatccaattaagtgtgttatcttaagatgatcttgtctagtttctctatccggatgtgtacacatgtgatt

SEQ ID NO: 41464 - DNA, 201 bp, Bos taurus
aagtggggatatgaagctcttgactgtcttttgactggtttcactggtgtcattgggtattgtctttttctctggagtcattaagtaaaccttggctctcygaacacactattcacaggtaatgtgactggtgaggtcaaactaatctaaccccacggaaactgctttgtagctccccgctgtttcagaatgaactttggt

SEQ ID NO: 41465 - DNA, 201 bp, Bos taurus
cccatctgcatcccttgttcctgtccttgtcaccctcctgagcatagttcaggaacagtttcatttcccaacctccctcctcatcccagatttttcaggtygtggggtggatgatggctggaccatagaatatttcagctttaagtctctgcagccagacagatactcttcctgagcacagtctcttgcacagcgattcat

SEQ ID NO: 41466 - DNA, 201 bp, Bos taurus
gcctaccattttgccaagtcctgcttctcccaacttaaggatgcagatagaatcactaacaaaattacggatatttaaagcaaagatccgaaactctatcrttaaaaatccttttccttggagacattaagcccacaggatatggtttggatggtggaatcagaaaaccagagctggcttcgtgtttctgaaactttgtct

SEQ ID NO: 41467 - DNA, 201 bp, Bos taurus
ggtttcccttagcaaccatatcacttatccttcttcccaaaacggctctgtaaataaacattattttgaagagacccactaaagattactctttaacaaaygatctgctttgtctcactccaaattaggtgttgacatggactcttatttaaagaaaatacaatttttatccatcataaacatttggagaaatttttcgaa

SEQ ID NO: 41468 - DNA, 201 bp, Bos taurus
ccacaactatgcacatggcctgggctgtcgcccctctagcctgaccctctgatctgagggtgtcgcaagaggccatggaaaggactcgaccaccagttaaycagtgagctggaccctggccataggaggctccacactcctccctgtccttgtaaagtcgaagtactctctgttcatcattcccactgtgggagaccattg

SEQ ID NO: 41469 - DNA, 201 bp, Bos taurus
tgagcctctaagtatagttgatccttccatgcatcctgttaggtttgatacctataaaccagcctcagaaaacagaatttgacttaccgggccaacttgaraagcccaggtggcatggtggtaaagaatccacctactaatgcaggagatacaagagatgtgggttcgatccctggcccgggaagatcccctggaggagga

SEQ ID NO: 41470 - DNA, 201 bp, Bos taurus
gatatttgtgcattagaaaggaaaaatgtgggagtggggtggggttagactctcttcaaaggaattgagagtaaaatctgtatgatattatcatacttaawaaactatggaaatggtattttagcctcagtaggagtttaaccatttgcaagtattttcagtttccctaagacactaaaaaaaccaaataaaaaaaagaag

SEQ ID NO: 41471 - DNA, 201 bp, Bos taurus
tgatgcagccaagaaaatacatgtaattcttttttttttttttttaattttcccctggatgttgtattcacatgaacttaattggtttacccaaattttgktgatcctccaccctaaaacttcaataggaattcaaatgcctctgcaattgggtataatcactataagtaaataaaagatgatgtggtggatggataagta

SEQ ID NO: 41472 - DNA, 201 bp, Bos taurus
ttttccacaaaaatgaactgctatttttcaaagccaatgaaaatgcaattgtggtacaaaaatattttggaggggttctaacattcatactaatttgtgtrtttggaaaagagttgtagttgggggagtcttcatacatgttcttagtcaacaaacactgtgaggctgcagttctaatcttttcttgctgtaaaaagtgag

SEQ ID NO: 41473 - DNA, 201 bp, Bos taurus
acaactgttcacaaaaccatgtcttcctgcctctattgtatactacttggctctgaaatacatttgggggcaagtgaaccacaacagttcctccagtaagrgagtgagcaaggtgagtgtgatcttatgtaacagtcacatcggaagcagctgggggaaacaagagcttggtataacccagaccagccacaggaaagatct

SEQ ID NO: 41474 - DNA, 201 bp, Bos taurus
tgagcctttgagagagatgaatgaaaaaacaaaacaggaagaaggccttgggaaacttacaaaatcatgacaaacacaagcttatgagaattttgaggcaygcttattataatttgcttgtcgttcccgagtccacccagtgtgtggtttaaagaagaaatatcaggtgtttctgccaagattttcaggagaaactgagtt

SEQ ID NO: 41475 - DNA, 201 bp, Bos taurus
ggcagccagccctgtaggaaggccagacccctatccctgagcgcccagcagccaaggactgggcccctccttgggtacaaacaggagactggggcctcacyggagtggctttgagcagaacgcgttcctgctgcaggaggcgactgtttacgcccagagcagtactctgagaagggcagctgagataaagcagctctggct

SEQ ID NO: 41476 - DNA, 201 bp, Bos taurus
aaaaccagaggagcaaagaccttatatccttcggtgaaaataaaggactaggctgcagggcccacatgcccttgctgtggcctcccaagtgtggctttctragccatggttgagcaggacatgctctgagttacactttcagagccaccacctcctcctcgctccatgtggcagcccctggccctcctgtcacctgtccca

SEQ ID NO: 41477 - DNA, 201 bp, Bos taurus
cagcaaaaaaaaaaaaaaagttattaaaaggagttaaaatgttcaagttcaggctttgaattctatctagctaactagtttataagggctgctggtcatcytaagattattccgctcttcccacaaagacctgcatcacttcctggcacctggatggggacccagcaggaggcgtcaggagatgcgacatttcccagccat

SEQ ID NO: 41478 - DNA, 201 bp, Bos taurus
aaaaacttaaaaaagaaaagagctgcttcgtgtctagcacaacaggtataaatatttctccaccaaccaggccccatttctctgaaatttcagaacaccayggacaaagggagggtctcgcttgttttcagaaaggaaagagaggacgggtgaaaggtccaggcgtgaatcctgctgtggacacctcaacaagacgatgga

SEQ ID NO: 41479 - DNA, 201 bp, Bos taurus
acaggcagaggtccagaggagaaggggtctaagtcaggaaaaaagtgatgaagggaggttccaggagggtaagagctggtgatgatggaggagagctggayggacagcgcgattttaggcaccacaaagggtgttttcatggggaaatgtttcttttaaatggtaccttgatatgtttaaacacaactgagatcttcacga

SEQ ID NO: 41480 - DNA, 201 bp, Bos taurus
tgcatatgtgggggaaatcaggaagtgaccacacacaggtccatggggaagtgaagactcaggaaatacctgaggagaacttaagtttaaacatcaggctrgtccttggcacacagtgaccaacaagttttaaaaaataataataaacaaaaacagagaaccttagggaaaagggaaaatcagatttccagagttgccacg

SEQ ID NO: 41481 - DNA, 201 bp, Bos taurus
ttctcctttcattcactttccatccatagctgccaggcttgtgttctctacacccacagaaacactaggataaaggtggtcaatggccttcaatggccatrtgcagtggactcattcactgattcagtcaacaaagctttgtgtcttctctgcatcagatgctgttcctggcctgcagatccagcaatgtaaaggctttct

SEQ ID NO: 41482 - DNA, 201 bp, Bos taurus
ggcccaggttgggtgttgtctggaggggagggccagactttcagggagaagaagtagtgagacacgagcccttgagtgtttgctcaggcacattccacttraataaacagctcatgaagctagttttcctaaggatctccttgccccaggaaccagagttgggcgtgaagaacggcggctgacctctgcaacgtgacaagc

SEQ ID NO: 41483 - DNA, 201 bp, Bos taurus
taggggtcaggaacatctgtgaggaatccttgagcttgggggccactttctgtggttgtggaggttagtgaggtggtgcaaggcagccaaatccaggctgytctccaggctgagggcccgcatggcgagcaccacccagggcggacacctcttcctcattctcacagttgcccattggtgtgggaggtggccctgaggagg

SEQ ID NO: 41484 - DNA, 201 bp, Bos taurus
atgcagagtaattagagatggggagctgatgcagagggctggtccctgcccttgatgggctgggcatctgggggtagcttggggcaccagggaaaggtgartcattcacaggggtcccagtggttctccctcaagtcctcatgtcaatgtgcttcccttgcttgctaggcttggggtgggcttgaggttaggaccggggct

SEQ ID NO: 41485 - DNA, 201 bp, Bos taurus
tggggtcaggctagctgtccagccctgacatgggggctgcacatcagtcatccctctatcttccaagtgcccgcagacgccctcgattcaagatgccagcygaggccccaagcagcgggtcagtatacaacagcagcccaggtagagggcagaggggtcagcagggccttctctggggcggctctgccctttcctctggga

SEQ ID NO: 41486 - DNA, 201 bp, Bos taurus
cagcttgggactgttctcacagcaagggttgcatcacagctaaggccttgggacctgtgtctttcagaattaaaaggacccatctggaataccctcgactyccctggtgtccagagacacccaggcctgggtccataacctggtgtaggaatgtccagtcactggcttcccttcctccccaaacaccgcaggtcattcttt

SEQ ID NO: 41487 - DNA, 201 bp, Bos taurus
aagatgcgagagtctgggctcactgaaattattcctttaatatccacctcagttatctgggagcagcatcctgtgttttctcatcctgagtttcttcaggrttcaccattctggcagctgtaattggcttgatggctccagcctcctttgttaactgacatggtagcaatactttagttctcaagtccaaaggtgagtgct

SEQ ID NO: 41488 - DNA, 201 bp, Bos taurus
ccactgagctcagatgcagggttggaggaaggaaggtgtctttgaggtgagacttggaggtgagcgggtgagggcataaacagaacatctgctttcattayccgaaaacaaatttagtgccaataaaaggtgttcaagtgagaagactggggatggaaattgacagtcaaaaacacagccatacatgatcctaactttaag

SEQ ID NO: 41489 - DNA, 201 bp, Bos taurus
aaactaagacagaaactaaaatcactcaaggccaaaaccctactcattccatcacatggggttgctgctgtcagtgacatggggacggcaggactctgatrggaaagaggccattgagtcactggtgcaggaagggtcccatccttgatggacatcagagctggatggacagagtcagtataaagagagaatgaaaatgat

SEQ ID NO: 41490 - DNA, 201 bp, Bos taurus
atactgaagctaaaacaatattgtaaatcgactaaacttcaattaaaaaaaataaggttgcagagagagttccacatagataatcccattccacactttakaaactgctctccatcttttagcagaaaataaaatggaaaagaaaaaacacactgctctgagtttgctcctgtaattcctcttttcctgactgattctgcc

SEQ ID NO: 41491 - DNA, 201 bp, Bos taurus
aactgttaaatggctaataatagcaatcacctcctgtgatcactgtgaagtttctttactataaatgaagcacttgaaggaaggcctggcatgtggtaagrgctcagtccatggtacctttcatacggacaagagctcagaaaccccaaaccggggcctggggaagcctggcagcacacacgtctggcaatctttcaagtc

SEQ ID NO: 41492 - DNA, 201 bp, Bos taurus
tgtctattgggagagatggacgagggacaaagataggctttattgttagcacatttagatacagataggtcctgcctcttttgaaagaagacccctcaaakggccacctccagctgcttcctctcctcttattcctgctgtgctggaaaggagaggaaagggtgcaggcctgggggatgtgtagctgatgtgagcagaagc

SEQ ID NO: 41493 - DNA, 201 bp, Bos taurus
tggtcagcagagcttggggaaggaactccccagggatgtcgagacaggctttccttctgtgtctccacaaatacatctcccgtgggccttcatcaaattaygcaaatctagatgtctttgcctgtcctccaggaaggctctcgccagaccctggctgaccttgacacggccaacctcaactcctctccctagttcctggct

SEQ ID NO: 41494 - DNA, 201 bp, Bos taurus
ccatgggacgaccataaggatgggtcctgggaccacgcagggaggaagactgaacatggtgggcttctctgtcaaagaccccaggaatctcacttccacayagtaaggcccatatgaatgtaaacacactggggaagtaactcaggaatggaagtttttagcccaaattaaaggttgctagttagaattcagtcacaacag

SEQ ID NO: 41495 - DNA, 201 bp, Bos taurus
cttcaatccctcactctctcctcttgggcgtctggttcttctctttcctttgacatccatacgctcagatcacaacctcttctcagcgcccttgggccccrtcagttcagccgatggacccttctccgtcttctctggtctccagctccctctcaacacacccagccccacttccctgctctcctctcctgtgcagagact

SEQ ID NO: 41496 - DNA, 201 bp, Bos taurus
tgttgccaagagccaggcttccatgtcactgctaaattgatggaatcgaggaccagccatgccagcctgccatgggacacggaggccctgagaaacagttyacactttcttccaaaacaaacaagggcttgagcagcggatggtgaacagcatggcgcctacagagctggccgcctgcaggagagttggcgcccatgcagt

SEQ ID NO: 41497 - DNA, 201 bp, Bos taurus
cagacactcgcctgcctggggccaccaggaacctggactaggcatgcggagtgtttgttctaatgggctgttctctgggtggtggccgggtgaggccctcragcgtcatggatggaaaagccctgagtggcttcactttcacggcaagtccttgtgagacgtgttgtctctgctgggggcctgagctgagggtcctccagc

SEQ ID NO: 41498 - DNA, 201 bp, Bos taurus
tattttggccggttcaggacccctctgaggggctgtttgctcaggattccctgtagagctggccaaggctgcaggacttgcattgccacctgacccctcgmtgtgccctcttctgcttccttcctctccttccagaggccagggtcccagacacgttccctgttaaacatcctgaactctacactcttctcagagtccaca

SEQ ID NO: 41499 - DNA, 201 bp, Bos taurus
tttgtctttttgaagactggtttccttgggctaaaggcccaggtgtgagaatgtcagatcctagctctggtcacttgagagttgttcccccgcggccccarcattcagagtgtcctttcgagtgactcttgccaatgtccatttccaccgactgtgtagggggttcccacccctcccagctctctcctacatgtattgcta

SEQ ID NO: 41500 - DNA, 201 bp, Bos taurus
ggctgttaacgacagctgccctcaggaaaggacctgggtgagtactgcggaaatggattgcagtcacaactggctttgaagaggccaattacaaggtaaawtttccatatatcctttaaggtaaagaaaaaaagaataaaaatccccaaatggccagagaacaagatgttctatatccctaaatatgacagggtaagtgct

SEQ ID NO: 41501 - DNA, 201 bp, Bos taurus
gaacccaaggcccccagaagtgaaagcatagagtcctaacccctggactgccagggaattcctgaactccaaccgttatataatgcttgtttcagggagamggtggtggtatatgagatgtgggcctactaggggcagaatgacatgttttggtcatttattgggaccctctggcctacagtagattaaatacggatgcaa

SEQ ID NO: 41502 - DNA, 201 bp, Bos taurus
cccaagggaagagacaacagagccctgctggcatccacccccagcacccaggaaggagacagaaagccaaaggccgggggccatttaccccgatgcagackctaaccctgtcccaggtcccagagactcacgatctcatcctccacgtcccggtggaactggtgctgctcgcgggaggcctgcaggcgccggcagcgctcc

SEQ ID NO: 41503 - DNA, 201 bp, Bos taurus
catttgggatccagttccctgaccagggatcaaaccgtggccccttgcattgggagtgtggagtgtcagccaccgcaccaccagggaagtctgattttctrtattctgatgctctgacttctagggcctgactgaccctgcagggttaactaattctcactggaaaagaccctgatgctgggaaagactgaaggcaaaaga

SEQ ID NO: 41504 - DNA, 201 bp, Bos taurus
gtcttgatcactctagctttataattaatcttactctctggcagatctcccctcaattcttttgttcatcttcaagatgaggctggccatcctaggccctytgttcttctatatccattttatttattaaaaaaaaattttatttatttggctgcgctggatctttagttacagcctgcaaacccgggccccctgcattgg

SEQ ID NO: 41505 - DNA, 201 bp, Bos taurus
tttttaatttataaaaagataaattgtatccccccacactcccaacccctcctttcctgccatcctttcaagtcaagggcctgggagctgggagagaaacygctggggctgtgccacggctccatgcctctgctctcacgacacaagagacctctggctgcccagaaaggagagaaagccgagctctggggaatcagcatg

SEQ ID NO: 41506 - DNA, 201 bp, Bos taurus
cacccagaagctgttctcaacccctgttggctccagctatccgtgtcagtcttccctcctgcacaaacaccctgctttcctttcccggacgccagtccctrcacctggccactacggtgtgactgtcctctgaccctcctggggctctgaccgtccacaccaggtgcctcctgtgtgaacaggctcctcactcaggctctg

SEQ ID NO: 41507 - DNA, 201 bp, Bos taurus
ggcttggccatttggacataacttcctggaggcatctagtttcctttcctgaaaatcaagggcaggggaacttctcgagcaggggttgaaaactgtggacyggaggccagactgcctgatgtgtgccactatcaaatgcttgggggtttctacacttacctttttgctgacctgcgtggctcatgggatcttagttcctca

SEQ ID NO: 41508 - DNA, 201 bp, Bos taurus
gctggcctttacccagctcttcagaggaatgccctctctgtgtgctacatcaccccgactccagaagggggcgctgtccccaccctgtttcgcaatgaggmggccggaggaccgagtggtaactacctgccctcccctcctcccccgggggccattctgcccaaactgaccactccctgcccggtctctcctgcaccctga

SEQ ID NO: 41509 - DNA, 201 bp, Bos taurus
gcggactcctcaccattgagcctctagaggagccctgatttttaatttgaagaaaatgcgcgcccttgctctagacagggaacaatggatatagttacatkgtataggccactttacagctagttacaaatggctctcttgggacttccagagcatttaattgttaacaggtatttttctaataatttacttttagatctc

SEQ ID NO: 41510 - DNA, 201 bp, Bos taurus
tggagacactgcgtgtaccttgcatttaatagatgatactgaacgtacattccgcttggagctaatctagtactgtaaatttaggggtaggtgtgtcagaygtgactgtcagtcttgttaattacattagtctgagcaacagcaactgatcattttgtagttttcctgaatgatattgtcagctttgagtattaaccatgg

SEQ ID NO: 41511 - DNA, 201 bp, Bos taurus
acttcagaacaggctggcagctcctcagaagatttaatgtggagttaccatctgatctggcagttccatccctaggagtagacccaggggcaatgaacacmcagggccccacaaaaacatgtaccggagcggtcaaagaagcattttaaataatagacaaaacatatggaaacagcccaactgtccaaacgagtggataaa

SEQ ID NO: 41512 - DNA, 201 bp, Bos taurus
tcactgagggcatcttccccacagacttggggtgaagcctgaggatttcttgcaagtgctccagaaagtccagctggacagtgaccacaaacaggccatcrcagaggtactggtcccccctcccccctcccccgcctgtgcctctgggctccctaggtcacgcgggtgtcatttcagatcggcgcggctggcctggtcctg

SEQ ID NO: 41513 - DNA, 201 bp, Bos taurus
cgcttcgattgtggggttgggcaggcagacagacggcccgagcacagccaatggcaggttctgtatgacgtgcgtgggagcctgactgtcttcacccacawtgctgggcccccaaggtatctggtgagcactcaccacggcgtgtgcgcagctgtctgactgtggtctcacccaccccaagcacgtgcctgtgggccctct

SEQ ID NO: 41514 - DNA, 201 bp, Bos taurus
aaaagagacaagctatttatatttttttatatcacgttggaaaatatgctgtgaggcagggtttcccaggaaaatttctggaacccggccaaacaagcacrtttctactctgcaggactcctcagtgcctttccatgaatccccaagagtgtgtgacatagacccagttaattggccctcagaatcttttttatggtaact

SEQ ID NO: 41515 - DNA, 201 bp, Bos taurus
ttccggatgacaaaagtcccctcgttaattgccacatcaaatgatcgagaacccccccccagtggaagccctcaaattaccatgaacacacactgcagccygaaggccgcagtggcgccccccaccctggccgcggccccgcgccccaccagattaggtttcgtgcgcgggcggaggtacaggaaggtccctgaggatttg

SEQ ID NO: 41516 - DNA, 201 bp, Bos taurus
gggagacatcccgcggtggagaggctccggccacgccccatgattggggcgggggaggggagacatcaggaactgtcgagaattatcagcactagttctgyaggagcaaaactgcgtcttcacagaatcctgtgttctccagcattgcattatgcgaaaccctggtttcaatgcggaaaaaggaggtgcatggctggagaa

SEQ ID NO: 41517 - DNA, 201 bp, Bos taurus
gaagggtcttccttggcacccacccacaccctctcctgggccacctcctcccacccacttcaggcgtcacctccggtccggaatcaggctggctgtacccmccagctttcaggcctcagttggcaggagccgagtagccaatgaaacctcaactcaccacagcttagatggctaagactcccagcgaggctgcctcttgcc

SEQ ID NO: 41518 - DNA, 201 bp, Bos taurus
actgaagccacttagcacgcacaggtcaaactctcagctcccagcagcctcgtctgtgaatcgggcatgtcccaccacagaggcctgcttgaaggacaggrcatcaatggcagcgttttccctggtgatgctcattgtctgatgctggacccaggaagaaccacactgtctgctgcctctatttcgtctctggagtgaggc

SEQ ID NO: 41519 - DNA, 201 bp, Bos taurus
gtgaaaccacaactcgataccatcctacgcccaccagaggggctaaaatgcaaaacgcagacgatgccaagctcaggccagagcacggggccacggcgctytcacaggctgcccacgggggtgggagctgatgccagaaacttgagagctgcgagtcactgaaccaggcagacttgctgctctacccttgagacgcccggc

SEQ ID NO: 41520 - DNA, 201 bp, Bos taurus
aaggcttgatgattccaagaagccaagggtggccctcacaggcgaggtcatagtcaatactccaggagggtttgctggtctgtttatcagcgggcgctttrcaccaggcgtggccttgacctcttcctttacacacatgtcagccctggcacaaggacatcccctgtgggaattagtatttatgtttcagagaagtcaaac

SEQ ID NO: 41521 - DNA, 201 bp, Bos taurus
gcactgctgctgctcctcgggggccgccagggccctgaggccacttggtgttcctgccacctcacttcttacactgggagttgcagagtgatttctcggcrctcagtgctccgtctagtcactggcccgcctcttagggagcgccctcgtttagtcgctctctcgcctcttagggagcgcccgcgctgccccttctctctc

SEQ ID NO: 41522 - DNA, 201 bp, Bos taurus
agctcccacattcagtgggcagctagtgtaggccacacattgctggaactaggaccccagcagggacttaaaatccgtgtgcgttcttcatccactgctaygtgacgaatcactgcagagcttagtgactccacagggagcagctcacagtccccagtgcctgtgcattgtcgcaggcgggcctgactcagggcctcctga

SEQ ID NO: 41523 - DNA, 201 bp, Bos taurus
gctgctgcttgccgagactcacgtggtcggggggagggaccacttccattggactccatggttcgtcctgaaccagccccaaacagagcagacgggctaaygccaaaggcggcggcctggcccgaggccagggcagcacccagcccaggtcagcagctcagggcgggctgggaggaggccgtttctccctgtttccccact

SEQ ID NO: 41524 - DNA, 201 bp, Bos taurus
accgcacgatgctcatcgttttatgtgcgcaacgacaggaaagaggctaaattgaagagcacggacgctgatgatttaatgggagaaggggcccctcagckcggaggagacccagcgcgtgactcagaaggcagcacgttaccaaggagacgagccgctccgactcacccaaggccagtcacactgacagctgcccttacc

SEQ ID NO: 41525 - DNA, 201 bp, Bos taurus
ggcctgtcagcttttcctccgcgggaaacctcctccctggcccagggcacactggggatcgcagaacctcagctttgacgtccccatcaggcctgggaacrtgcaagttggctgcagcctcggtccatggcgtctctgacttcagagtaaccccctatgggggcccagatgccacccacgatgccactcccgggctctcac

SEQ ID NO: 41526 - DNA, 201 bp, Bos taurus
gcacctccctccttgctccccctgctggaaccccatgggagtgcagccgcatgctggggctcccctgggaggcgacacccacccagacaaagcacccccaygggcctgcgagctcttagaatccagttcacggtatgtgccctctcgctattaaccggccttctctttgtatgtgagccacgtctggcttggctgaaggtg

SEQ ID NO: 41527 - DNA, 201 bp, Bos taurus
aatgcccatgactgctgttgctttgtagagagactttacagcataaagcaaaaaatatttactctctggccctgaaatgagcagttctcattttaccctaygttctgcaggcttttgttacgcaggttggtagctgacagactgccatctaatcgttactgatcaggtcagggtgaccagccccacacggtggaggagcag

SEQ ID NO: 41528 - DNA, 201 bp, Bos taurus
gcagggggcccaggttcaacccccggtcagggaactagatcccacctgccgcaactagcactgggcacaggcaaattaaatactatgttttaaagccacayaccaaaatcctcaacactgtgggccttccacgtgggggccccagccccttttcctgatttttctagtagacatgtacttgtattataaaataatttaaca

SEQ ID NO: 41529 - DNA, 201 bp, Bos taurus
ggagggttcttccttgctgctcctcgtggcggctggccgtgcctggcgctcctcggttggtgggtgatcgctctgcttccggccatcttccctcggcctckcccgctgtgagcctgtgtctctgagtctctccttgtgaggacactggtctcggaatgtaggtcccagtcttatgcagtggaacctcagcttcacagacgc

SEQ ID NO: 41530 - DNA, 201 bp, Bos taurus
cagtattctggcccggagaatcccacggactgtagagtccacgtacagtccactgtatagtcgtgtgacagtccacggctgagcgactttgactttcacaygtccatggccattcttggtccatgccaaatggttgtaggtgcagccgcccttcagagccttttggtgtggaccgatgcctgcatgtgactgcaccctcct

SEQ ID NO: 41531 - DNA, 201 bp, Bos taurus
ggccgctgacacactgcctcccaggttcctcctgctgtggccgcgtttgcagcctggacgtgagagtctgtgtcactcctgtcctggagttttccaccagrgacctggaagaccctctcgggcctgagtgcctcagccagcacagccccgatacccaggggcacgctctacgtgcaggctgggctcagggcgggtgttatg

SEQ ID NO: 41532 - DNA, 201 bp, Bos taurus
ctctgcttcctaaacatccgcctccctgaaatccgggacactgccaggctgtccacacccacgatgggctgggggactttgggcctcagtcccctccctgyagctcagaatggagattgatgcgtctgtggttggaattcctggggggcggcggtctagctcccctggacagcttctcgggcctgcggggcgtctcaggga

SEQ ID NO: 41533 - DNA, 201 bp, Bos taurus
gcctgctttcctgtgggccaaagggctttatgaggctcggggccaccctcgacctgccagtgcggtcaggggcaggctcagaagaggcaaggcggggttcrgaggtcaaagttgggcaggcctggcccagaatggcgtgagtgcttgtcctggcctcccgtacaccctgggaggtcacggaccactgtgggcccctgagtg

SEQ ID NO: 41534 - DNA, 201 bp, Bos taurus
gccctcactctccccacagtggagcccaggcacctgcacacgtgcgcgtctgtggcgtctcccggcatgaccacacccatggacaccgtctctacctcacrggggccgcgtgtgacaccgtcccagcaggccatctcaccgggggcaggagccacgagagatgccacacgagctgagagtcgactcagaacgcggtttgag

SEQ ID NO: 41535 - DNA, 201 bp, Bos taurus
gtgcacactcactgtggcacacacacacgcgttcccttggtgtacagtcacagtgcacactgtcacagtgcacactcactgtggccttcagcaagccagcrgcatgcccacgggtgccctgacagttctgacatcaatcatcaaagaccgaaacgtgggctgcggcccatttcctggaaatctccactgtttcccccaaat

SEQ ID NO: 41536 - DNA, 201 bp, Bos taurus
catcgctcaaggacctgcccgcctggcgccccagcttctactccctggtgggtggctcaggtcatctcactggttcccattcagcatgtccggtgaacacrgcttgaagggcagagttacgagctttacaagaccaggcaggagagacatccccgagccggacaccacgtccaccccatcccccagcacaagccggtggaa

SEQ ID NO: 41537 - DNA, 201 bp, Bos taurus
ctgagcaccacagccagagcacccccgccttggcagcgactgctactattggcccagccagcggatcatccacctggcagtcgagagcctggggcaccagygacgtccaggtcctctttacccaccgcccaggggagcttcagagacaacacagcaaatagagcacaggtgcccgggcgtccctccctcacacgtccccct

SEQ ID NO: 41538 - DNA, 201 bp, Bos taurus
gggctgggtcgaccttctccgtggccacccctttcttgagtggctgggagccaaagttggcacgaaaataaagttgttcaggcctctgcccatgtgttggygtgttttgtgcccggtggggagggcacgctcctcgtggaggcgggggaggagctagcatgcgcggccgtgccctcgcctcaaagggaggcgggctcagcc

SEQ ID NO: 41539 - DNA, 201 bp, Bos taurus
tctggctgcagctcttaacacaaactgctgctgtttccccccaaaggggctttcttccagatggttcctggtccatgaggagccaccagccgggaggtccygggccccagagggtgcagtgggagccagagtggctggtccctgcagaggcggaactggggggctgcggagggctgtcagccagcccacagcggcacagtt

SEQ ID NO: 41540 - DNA, 201 bp, Bos taurus
aggccagcacacggcatcactgttacgtcggagcccaaggatgaaacagacccgctgagttacaaaacacagacagacgcacagactggaaagcaaatgcrtgctgcagtgcagtccagtgcaggccagttcaagccagtcgctcagtcgtgtccgactcttcatgaccccatgaatcgcagcacgcagggcctccctgtc

SEQ ID NO: 41541 - DNA, 201 bp, Bos taurus
cacgctgggctcggcagccatgcctcggagtggaagaaaaatgtggaaaccggagaggggcttccgagttgccggcctgctccttctggacggggcttgcygggtctccagagccctgatccacgccagctccaagaccttcatgctttttgtggcttgggtgagctcacctcgtcaggccctaacagctaccaggggctg

SEQ ID NO: 41542 - DNA, 201 bp, Bos taurus
tagcgtccacctccagagctcacggcccccacagccaggctgggcacaggaagagctcagagcctgaggtaggtgcaggggtgggtccgaggctcccaaarccccgccgtggccatgcagctgggcgggcagcccccattgcctcagcgaacttctgcgccagggagggacgtagcagctctatggcgaacccaggcccac

SEQ ID NO: 41543 - DNA, 201 bp, Bos taurus
cggggcggtgagcagcctggtctcccctggaaacccagggaacgacacaggccccacctcggcacctcagggtgcaggtgaggcatggagagccaggcacrtgggggctgttgccacctcaggcccgccccccagcacacaggcctccctgctcccacccaccggccagggtccgtggcacctcagcctgcagtcgtgacc

SEQ ID NO: 41544 - DNA, 201 bp, Bos taurus
aggcaggaacctgcctgtggcggcccgtctcctctctcatagccattaaactgagtccggagtcacacacggcagatttggattgttccgaaagagacacrgaaggtgaacctgtggcctccggctggggcccagagaaggtgggtggggggtggggcagcccaggtgacaccaagccctattctccaggagccccgtcac

SEQ ID NO: 41545 - DNA, 201 bp, Bos taurus
ccctgaatgccaggctagagggatgcaggaccccgggaatccctggcctgaagctgcagagacacgacattggcggggcaggcagccgcacacaagtgaargaggcagggctgggctgtggcatttattacatctgctttgacaaaaataaataattcacacacattcttcagaaacatgaaaaatgaagccggcggagca

SEQ ID NO: 41546 - DNA, 201 bp, Bos taurus
cccaccctttaaatgaggtgcaagggcgccccctggtggcggtccgctcccatctgtgggattcggttctccaacccaggctgaacccaggccaggcagcrggaaagccccagggaattcccagcatcttcctcctaattttatttgggtgcccgggacgccctcacaccccacccagcctgcacatccggccagaagtgt
